(19) United States
(12) Patent Application Publication
(10) Pub. No.: US 2023/0118983 A1
(43) Pub. Date: Apr. 20, 2023

(54) Tetravalent FZD and WNT Co-receptor Binding Molecules and Uses Thereof

(71) Applicant: AntlerA Therapeutics Inc., Toronto (CA)

(72) Inventors: Stephane ANGERS, Mississauga (CA); Sachdev SIDHU, Toronto (CA); Levi BLAZER, Etobicoke (CA); Jarrett ADAMS, Toronto (CA); Somasekar SESHAGIRI, Toronto (CA)

(21) Appl. No.: 17/846,846

(22) Filed: Jun. 22, 2022

Related U.S. Application Data
(63) Continuation-in-part of application No. PCT/IB2021/061972, filed on Dec. 17, 2021.
(60) Provisional application No. 63/127,408, filed on Dec. 18, 2020.

(51) Int. Cl. C07K 16/28

(52) U.S. Cl. CPC C07K 16/2863; C07K 16/28; C07K 2317/626; C07K 2317/622; C07K 2317/31; C07K 2317/35; C07K 2317/92; A61K 39/00

(57) ABSTRACT

Described herein are tetravalent binding antibody molecules comprising a FZD receptor binding domain and an LRP5/6 co-receptor binding domain on opposite termini of an Fc domain that activate a Wnt beta-catenin signaling pathway, nucleic acids and vectors encoding said molecules and methods for their use.

### SEQUENCE LISTING

[0001] The instant application contains a Sequence Listing which has been submitted electronically in ASCII format and is hereby incorporated by reference in its entirety.

### BACKGROUND

[0002] Wnt signaling pathways are critical for embryonic development and tissue homeostasis in adults. Wnt signaling is initiated when a Frizzled (FZD) receptor on the cell surface membrane binds with a Wnt ligand. Wnt ligands are secreted growth factors that regulate various cellular processes such as proliferation, differentiation, survival and migration. Nineteen Wnt ligands exist in humans that interact with a network of ten Frizzled cell surface receptors (FZD) and one of several co-receptors that guide the selective engagement of different intracellular signaling branches (Wodarz, A. and Nusse, R. Annu. Rev. Cell Dev. Biol. 14, 59-88 (1998); Angers, S and Moon, R. T., transduction. Nat. Rev. Mol. Cell Biol. 10, 468-477 (2009)). FZDs have conserved structural features including seven hydrophobic transmembrane domains and a cysteine-rich ligand-binding domain. FZDs are known to function in three distinct signaling pathways, known as the Wnt planar cell polarity (PCP) pathway, the canonical Wnt/β-catenin pathway, and the Wnt/calcium pathway. The presence of Wnt co-receptors is also required to direct the differential engagement of the intracellular signaling cascades listed above. For example, Wnt ligands bind to a Frizzled receptor and a member of the low-density lipoprotein receptor-related proteins 5 and 6 (LRP5/6) co-receptor family to activate the Wnt/β-catenin pathway, or with a receptor tyrosine kinase-like orphan receptors 1 and 2 (ROR1/2), related to receptor tyrosine kinase (RYK) or protein tyrosine kinase 7 (PTK7) co-receptor to activate alternate β-catenin-independent signaling pathways.

[0003] Wnt ligands are universally important for the control of tissue stem cells self-renewal and regulation of many progenitor cell populations, but the hydrophobicity and sensitive tertiary structure of Wnt proteins makes their biochemical purification challenging and their use in vitro and in vivo inefficient. Described herein are tetravalent binding antibody molecules that activate a Wnt signaling pathway and methods for their use.

### SUMMARY OF THE INVENTION

[0004] Described herein are tetravalent binding antibody molecules that activate a Wnt signaling pathway and methods for their use. The tetravalent binding antibody molecules bind to both an FZD receptor, e.g., Frizzled Class Receptor 1 (FZD1), Frizzled Class Receptor 2(FZD2), Frizzled Class Receptor 3 (FZD3), Frizzled Class Receptor 4 (FZD4), Frizzled Class Receptor 5 (FZD5), Frizzled Class Receptor 6 (FZD6), Frizzled Class Receptor 7 (FZD7), Frizzled Class Receptor 8 (FZD8), Frizzled Class Receptor 9 (FZD9), or Frizzled Class Receptor 10 (FZD10) and a Wnt co-receptor, e.g., LRP5 or LRP6 (LRP5/6), thereby activating a Wnt signaling pathway. In an embodiment, the tetravalent binding antibody molecules bind to both a FZD4 receptor and LRP5 and/or LRP6 and activate the Wnt/β-catenin signaling pathway. The tetravalent binding antibody molecules of this invention are also referred herein as “FZD Agonists”, Frizzled and LRP5/6 Agonist (FLAg), and in some embodiments as “ANTs”.

[0005] The tetravalent binding antibody molecules include an Fc domain comprised of CH2 and CH3 domains or fragment thereof comprising the CH3 domain, and a first bivalent binding domain that interacts with one or more FZD receptor, e.g., one or more of FZD1, FZD2, FZD3, FZD4, FZD5, FZD6, FZD7, FZD8, FZD9, and FZD10, and a second bivalent binding domain that binds a WNT co-receptor, e.g., LRP5 or LRP6, wherein the FZD binding domain is linked to one terminus of the Fc domain and the co-receptor binding domain is linked to the other terminus of the Fc domain. Thus, the binding domain for the FZD receptor and the binding domain for the WNT co-receptor are not directly linked rather they are separated by the Fc domain, or fragment thereof comprising the CH3 domain.

[0006] The Fc domain of the FZD Agonists may be an Fc domain of an immunoglobulin with or without effector function. The immunoglobulin may be an IgG, e.g., an IgG₁. In an embodiment of this invention the tetravalent binding antibody molecule comprises two polypeptides containing an Fc region that dimerize via the intrinsic ability of the Fc region in each polypeptide to dimerize or via a knob-in-holes configuration within the Fc. Thus, the Fc dimer may be a heterodimer or a homodimer. Methods for dimerizing peptides via a knob-in-hole configuration are described in WO2018/026942, inventors Van Dyk et al., Carter P. (2001) J. Immunol. Methods 248, 7-15; Ridgway et al. (1996) Protein Eng. 9, 617-621; Merchant, et al. (1998) Nat. Biotechnol. 16, 677-681, and; Atwell et al., (1997) J. Mol. Biol. 270, 26-35, all incorporated herein by reference.

[0007] In an embodiment, each of the binding domains of the FZD Agonists described herein are bivalent and each may be monospecific, having two binding sites for the same epitope of an FZD receptor, e.g., FZD4, or Wnt co-receptor, e.g. LRP5/6, or bispecific having two binding sites with each site binding a different epitope on an FZD or Wnt co-receptor, e.g., a Wnt1 binding (domain E1-E2 within the extracellular domain of LRP5/6) site and a Wnt3 binding site (domain E3-E4 within the extracellular domain of LRP5/6) within the LRP5/6 co-receptor. In an embodiment, the LRP5/6 binding domain binds to a Wnt3A site (domain E3-E4) on LRP5 and binds to a Wnt3A site (domain E3-E4) on LRP6.

[0008] In embodiments of this invention the FZD binding domain linked to the Fc domain of the FZD Agonist comprises one or more immunoglobulin heavy-chain variable domain (VH) fragments and/or one or more immunoglobulin light-chain variable domain (VL) fragments that bind the FZD, e.g., FZD4. In an embodiment of this invention the FZD binding domain may comprise Fabs, a diabody or single chain variable fragments (scFv) single-domain antibody fragments, e.g., V_{H}H, or combinations thereof that bind to the same or different epitopes on the FZD.

[0009] In an embodiment of this invention the VHs and/or VLs of the FZD binding domain binds FZD4 or FZDS and comprise the light chain CDRs and the heavy chain CDRs of a FZD4 or FZDS binding antibody of Table 1, Table 2, or Table 6, and/or comprise light chain CDRs and heavy chain CDRs that are 50%, 55%, 60%, 75%, 80%, 85%, 90%, 95%, 96%, 97%, 98% or 99% identical to the CDRs of an FZD4 antibody of Table 1, Table 2 or Table 6, and still retain binding to the FZD4 or FZDS receptor. For example, in an embodiment of the invention, the FZD binding domain may comprise a first heavy chain (CDR-H1), a second heavy chain (CDR-H2), and/or a third heavy chain (CDR-H3), wherein the VH that binds FZD may comprise CDR-H1 of SEQ ID NO: 24, SEQ ID NO: 365, or SEQ ID NO: 893, a CDR-H2 of SEQ ID NO: 51, SEQ ID NO: 61, SEQ ID NO: 462, or SEQ ID NO: 894 and/or CDR-H3 of SEQ ID NO: 79, SEQ ID NO: 90, SEQ ID NO: 484, or SEQ ID NO: 895 and a first light chain (CDR-L1), a second light chain (CDR-L2), and/or a third light chain (CDR-L3), wherein the VL that binds FZD may comprise CDR-L1 of SEQ ID NO: 1, SEQ ID NO: 3 or SEQ ID NO: 12, a CDR-L2 of SEQ ID NO: 2, SEQ ID NO: 3 or SEQ ID NO: 12 and/or a CDR-L3 of SEQ ID NO: 3, SEQ ID NO: 12, SEQ ID NO: 285, or SEQ ID NO: 896.

[0010] In an embodiment of this invention the co-receptor (LRP5/6) binding domain linked to the Fc domain of the FZD Agonist comprises one or more immunoglobulin heavy-chain variable domain (VH) fragments and/or one or more immunoglobulin light-chain variable domain (VL) fragments that bind to the Wnt co-receptor, e.g., LRP5 and/or LRP6. For example, in an embodiment of the invention, the LRP binding domain may comprise a first heavy chain (CDR-H1), a second heavy chain (CDR-H2), and/or a third heavy chain (CDR-H3), wherein the VH that binds LRP may comprise a CDR-H1 of SEQ ID NO: 527, SEQ ID NO: 528, SEQ ID NO: 536, SEQ ID NO: 716, or SEQ ID NO: 720, a CDR-H2 of SEQ ID NO: 552, SEQ ID NO: 553, or SEQ ID NO: 566, SEQ ID NO: 785, or SEQ ID NO: 791 and/or a CDR-H3 of SEQ ID NO: 584, SEQ ID NO: 585, SEQ ID NO: 586 or SEQ ID NO: 603, SEQ ID NO: 856 or SEQ ID NO: 862 CDR-H3 and a first light chain (CDR-L1), a second light chain (CDR-L2), and/or a third light chain (CDR-L3), wherein the VL that binds LRP may comprise CDR-L1 of SEQ ID NO: 1, a CDR-L2 of SEQ ID NO: 2, or SEQ ID NO: 491 and/or a CDR-L3 of SEQ ID NO: 130, SEQ ID NO: 492, SEQ ID NO: 493, SEQ ID NO: 510, SEQ ID NO: 623 or SEQ ID NO: 665.

[0011] In an embodiment of this invention, the Wnt co-receptor binding domain is bivalent and may comprise a diabody, or may comprise a Fab, a single chain variable fragment (scFv) or a single domain antibody fragments (V_{H}H) or combinations thereof for binding to the same or different epitopes on the co-receptor. In embodiments of this invention the VHs and VLs of the Wnt coreceptor binding domain comprise the light chain CDRs and/or the heavy chain CDRs of a LRP5 and/or LRP6 binding antibody of Table 3, Table 4 or Table 6, or comprise light chain CDRs and/or heavy chain CDRs that are 50%, 55%, 60%, 75%. 80%, 85%, 90%, 95%, 96%, 97%, 98% or 99% identical to the CDRs of an LRP5 and/or LRP6 antibody of Table 3, Table 4 or Table 6, and still retain binding to the LRP5 and/or LRP6 co-receptor. In an embodiment of this invention the Wnt co-receptor binding domain linked to the Fc domain of the FZD Agonists described herein comprises a diabody, formed by two peptides each peptide comprising a heavy-chain variable domain (VH or VH domain) linked to a light-chain variable domain (VL or VL domain) wherein the VH and the VL from one peptide pair with the VL and VH of the other peptide forming the diabody. In this configuration, the binding domain has two binding sites that bind to the Wnt co-receptor, e.g., LRP5 or LRP6. The diabody may be monospecific binding the same site on the co-receptor or may be bispecific (bs) binding two different sites on the co-receptor. By using a knobs-in-holes Fc configuration, the peptides comprising the VH and VL linked to Fc regions, can be non-identical but will still pair to form a bispecific binding domain capable of binding to two different sites on the Wnt co-receptor (e.g. LRP5 or LRP6).

[0012] The peptides forming the diabodies, the V_{H}H, the scFv, and the Fabs that form the binding domains may be derived from an antibody selected for its binding to a desired target, a “source antibody”. For the FZD binding domain, the “FZD source antibody” may be an antibody that binds to one or more of the FZD receptor(s), e.g., one or more of FZD1, FZD2, FZD3, FZD4, FZD5, FZD6, FZD7, FZD8, FZD9, and FZD10, and antagonizes Wnt signaling or inhibits Wnt binding to the given FZD receptor(s). Alternatively, the FZD source antibody may be an antibody that binds to the FZD receptor(s) without antagonizing Wnt signaling or without inhibiting Wnt binding to the FZD receptor Likewise, for the co-receptor binding domain, the “co-receptor source antibody” may be an antibody that binds to the Wnt co-receptor, e.g., LRP5/6, and antagonizes Wnt signaling or inhibits Wnt binding to the Wnt co-receptor. Alternatively, the co-receptor source antibody may be an antibody that binds to a co-receptor, e.g., LRP5/6, without antagonizing Wnt signaling or without inhibiting Wnt binding to the co-receptor.

[0013] In an embodiment of this invention the FZD binding domain of the FZD Agonist may bind specifically to a specific FZD, e.g., FZD4, with a higher affinity than to other FZDs, i.e., FZD1, FZD2, FZD3, FZD5, FZD6, FZD7, FZD8, FZD9, and FZD10, or may be pan-specific, binding to one or more other members of the FZD receptor family. In an embodiment the FZD binding domain binds specifically to one FZD with an affinity greater than 10-fold over the binding to any other Frizzled family member.

[0014] In an embodiment of this invention the FZD Agonist binds to FZD4, a “FZD4 Agonist”. The FZD4 binding domain of the FZD4 Agonist may bind specifically to FZD4, binding with a higher affinity to FZD4 over other FZDs, or may be pan-specific, binding to FZD4 and one or more other members of the FZD receptor family, e.g., Frizzled Class Receptor 1 (FZD1), Frizzled Class Receptor 2(FZD2), Frizzled Class Receptor 3 (FZD3), Frizzled Class Receptor 5 (FZD5), Frizzled Class Receptor 6 (FZD6), Frizzled Class Receptor 7 (FZD7), Frizzled Class Receptor 8 (FZD8), Frizzled Class Receptor 9 (FZD9), or Frizzled Class Receptor 10 (FZD10). In an embodiment the FZD binding domain binds specifically to FZD4 with an affinity greater than 10-fold over any other Frizzled family member listed above.

[0015] In an embodiment of this invention the FZD Agonist binds to FZD5, a “FZD5 Agonist.” The FZD5 binding domain of the FZD5 Agonist may bind specifically to FZD5, binding with a higher affinity to FZD5 over other FZDs, or may be panspecific, binding to FZD5 and one or more other members of the FZD receptor family, e.g., FZD1, FZD2, FZD3, FZD4, FZD6, FZD7, FZD8, FZD9, or FZD10. In an embodiment the FZD binding domain binds specifically to FZD5 with an affinity greater than 10-fold over any other Frizzled family member listed above.

[0016] In an embodiment of the FZD Agonists of this invention the Wnt co-receptor binding domain is a monospecific bivalent LRP5/6 co-receptor binding domain and binds to a single epitope on the LRP5 and/or LRP6 co-receptor, e.g., an epitope of the LRP5 and/or LRP6 coreceptor that binds to Wnt1 (E1-E2 domain of LRP5 or LRP6) or binds Wnt3a (E3-E4 domain of LRP5 or LRP6). In an embodiment of this invention the co-receptor binding domain is a bispecific bivalent LRP5/6 binding domain that binds to two epitopes within the LRP5 and/or LRP6 co-receptor extracellular domain, e.g., the co-receptor binding domain interacts with the Wnt1 (E1-E2) and Wnt3 (E3-E4) epitopes of the LRP5 and/or LRP6 co-receptor. In an embodiment of this invention the co-receptor binding domain is a bispecific bivalent binding domain that binds to an extracellular domain of LRP5 and LPR6, e.g., the domain interacts with the Wnt1 (E1-E2) epitope of the LRP5 co-receptor and the Wnt1 (E1-E2) epitope of the LRP6 co-receptor LRP5, or the domain interacts with the Wnt3a (E3-E4) epitope of the LRP5 co-receptor and the Wnt3a (E3-E4) epitope of the LRP6 co-receptor or alternatively the domain interacts with a Wnt1 (E1-E2) epitope or LRP5 co-receptor and a Wnt3a (E3-E4) epitope of LPR6 co-receptor or vis versa.

[0017] Various formats of tetravalent binding antibody molecules described herein are depicted in FIG. 6. In a particular format, Diabody-Fc-Fab, an LRP5/6 binding diabody is linked to the N-terminus of an Fc domain and two Fabs are linked to the C-terminus of the Fc domain wherein the Fab is linked to the CH3 of the Fc domain via the Fab heavy chain (VH) variable domain. Alternatively, the Fab is linked to the CH3 of the Fc domain via the variable region (VL) of the light chain.

[0018] We previously reported multivalent binding molecules comprising an Fc domain, a FZD binding domain and a Wnt co-receptor (LRP5/6) binding domain on opposite termini of the Fc domain, e.g., a molecule having a FZD4 diabody linked one terminus of an Fc domain and a LRP5/6-binding diabody linked to the other terminus of the Fc domain, see PCT/IB2019/051174 inventors Angers et al. and PCT/IB2020/055463 inventors Angers et al., both incorporated in their entirety by reference.

[0019] It has been reported that Wnt-βcatenin signaling, specifically through activation of FZD4, is important for vasculature development and for adult vasculature homeostasis. More specifically, it is critical for barrier function at the blood-retina and blood-brain barriers (BRB and BBB). Defects in FZD4 signaling can lead to endothelial cell permeability defects and genetic mutations within this pathway are known to lead to vascular defects (e.g. Norrie disease, FEVR). At the blood-retina barrier, the extracellular ligand Norrin predominantly activates a FZD4-TSPAN12-LRP5 complex to regulate endothelial cell-cell interactions, barrier functions and permeability (Wang et al. (2012) Norrin/Frizzled4 signaling in retinal vascular development and blood brain barrier plasticity. Cell. 151:1332-1344). At the blood-brain barrier the secreted Wnt7a/b growth factor chiefly activates the FZD4-GPR124-LRP6 receptor complex (Chang et al., (2017). GPR124 is essential for blood-brain barrier integrity in central nervous system disease. (Nat. Med. 23: 450-460). The FZD4 Agonists described herein, e.g., the configurations having a diabody binding domain for a LRP5/6 and an FZD4 binding domain comprised of two Fab fragments that bind FZD4, wherein the binding domains are on opposite termini of an Fc domain, produce a particularly stable and homogenous molecule with an unexpectedly high level of Wnt-βcatenin signaling pathway activation in endothelial cells that translates into increased barrier function and decreased vascular permeability (FIG. 11). In essence, the FZD4 Agonists described herein function as Norrin and Wnt7a/b mimetic molecules.

[0020] This invention also includes methods for using the FZD Agonists described herein. Described herein are methods to activate a Wnt signaling pathway, e.g., the Wnt/β-catenin signaling pathway, using the tetravalent binding antibody molecules of this invention, which are contemplated to promote the proximity of FZD receptors and Wnt co-receptors, e.g., one or more of FZD1, FZD2, FZD3, FZD4, FZDS, FZD6, FZD7, FZD8, FZD9, and FZD10 receptors and LRP5 and/or LRP6 co-receptors, on a cell wherein binding by the FZD Agonists to both FZD receptor(s) and the LRP5 and/or LPR6 co-receptor(s) activates the Wnt signaling pathway.

[0021] Blood-retina barrier (BRB) formation and retinal angiogenesis require βcatenin signaling induced by the ligand norrin (NDP [Norrie disease protein]), the receptor FZD4, co-receptor LRP5, and the TSPAN12 (tetraspanin 12). As such, an aspect of this invention is a method for promoting and/or maintaining retinal vasculature barrier function and angiogenesis by treating eye tissue, e.g., retinal tissue, with an effective amount of a tetravalent FZD4 Agonists of this invention.

[0022] Also, an aspect of this invention is a method for promoting, restoring and/or maintaining the BRB and BBB functions by treating the BRB or BBB vasculature with an effective amount of a tetravalent FZD4 Agonist described herein. A further aspect of this invention is a method for treating a subject having a disorder or condition characterized by defective retinal or brain angiogenesis characterized by reduced endothelial cell barrier function leading to vascular leakage by administering to such subject an effective amount of a FZD4 Agonists of this invention. A further aspect of this invention is a FZD4/LRP5 tetravalent binding antibody molecule or pharmaceutical composition for use in the treatment or prevention of a disorder or condition characterized by defective retinal or brain angiogenesis and/or characterized by reduced endothelial cell barrier function and/or vascular leakage. A further aspect of this invention is a method of treating or preventing a disorder or condition characterized by defective retinal or brain angiogenesis and/or reduced endothelial cell barrier function and/or vascular leakage comprising administering to a person in need thereof a therapeutically effective amount of a FZD4/LRP5 tetravalent binding antibody molecule described herein. A further aspect of the invention is the use of a FZD4/LRP5 tetravalent binding antibody molecule for the manufacture of a medicament for the treatment or prevention of a disorder or condition characterized by defective retinal or brain angiogenesis and/or reduced endothelial cell barrier function and/or vascular leakage. Such disorders or conditions include ocular disorders, including but are not limited to disorders of the retina or macula. Such disorders of the retina or macula include, but are not limited to diabetic retinopathy, retinopathy of prematurity, Coats' disease, FEVR, Norrie disease, macular degeneration, diabetic macular edema, and pediatric vitreoretinopathies. Additional disorders or conditions included in embodiments of this invention include but are not limited to Alzheimer's disease, epilepsy, multiple sclerosis, ischemia, and stroke.

[0023] An embodiment of this invention includes methods for producing vascularized cerebral organoids by promoting the barrier function of the vasculature network throughout the organoids, and thereby mimicking blood-brain-barrier function using an effective amount of a tetravalent FZD4 Agonist described herein.

[0024] Also, an embodiment of this invention is a method of treating a subject suffering from a gastrointestinal disorder, including a subject having inflammation of all or part of the intestines, also known as inflammatory bowel disease, by administering to such subject an effective amount of a pharmaceutical composition of this invention, e.g., a composition comprising a FZD5 Agonist. Examples of inflammatory bowel disease include, but are not limited to, Crohn's disease, and ulcerative colitis.

[0025] Also, an embodiment of this invention are methods for directing differentiation of iPS or other pluripotent stem cells (PSCs) towards various lineages by culturing these cells in the presence of an effective amount of a tetravalent binding antibody molecule of this invention.

[0026] Also described herein are methods for making the tetravalent binding antibody molecules of this invention.

[0027] The modular aspects of this invention allow for mixing and matching binding domains derived from FZD-binding antibodies and LRP5/6-binding antibodies on opposite termini of the Fc domain to generate a tetravalent binding antibody molecule that can engage a FZD-LRP5/6 co-receptor complexes to selectively activate Wnt signaling. The modularity and effectiveness of the tetravalent binding antibody molecules for activating Wnt signaling pathways described herein contrasts with the Wnt surrogates described in the prior art that consists of monovalent FZD and Wnt co-receptor binding ligands, or FZD and Wnt co-receptor binding ligands wherein the binding ligands are not attached to opposite ends of an Fc domain.

### BRIEF DESCRIPTION OF THE FIGURES

[0028] FIG. 1A and FIG. 1B. Single point ELISAs. FZD4-binding antibodies isolated from affinity matured libraries of the known FZD4-binding antibodies 5044 (FIG. 1A) and 5027 (FIG. 1B) bind to FZD4 sites that compete with their parental antibody. The reaction was stopped by adding 1M H₃PO₄ and the absorbance was measured spectrophotometrically at 450 nm in a microtiter plate reader; white=BSA; black and white stripe=Fc; gray=FZD4+blocking antibody; and black=FZD4.

[0029] FIG. 2. Epitope mapping of FZD4 antibodies. FZD4 and 5027 and 5044 have overlapping epitopes. The pan-FZD binder 5016 is a positive control showing that the antigens are functional, with the exception of “FZD4_Swap10”. Both FZD4-specific antibodies 5027 and 5044 are unable to bind to “FZD4 Swap 7” suggesting that these molecules bind to this region of the FZD ECD.

[0030] FIG. 3A. Size-exclusion chromatography (SEC). Analysis of FZD4 antibodies as compared to Trastuzumab. Protein elution was monitored using absorbance at 280 nM.

[0031] FIG. 3B. ELISA specificity. Measurements of the FZD4 antibodies determined against FZD4 and against FZD1 and FZD10, two members of the FZD family most-closely related to FZD4. The reaction was stopped by adding 1M H3PO4 and the absorbance was measured spectrophotometrically at 450 nm in a microtiter plate reader.

[0032] FIG. 4. Phage clonal ELISA of synthetic antibodies targeting LRP5. The results demonstrate that the synthetic antibodies bound to LRP5. The absorbance was measured spectrophotometrically at 450 nm in a microtiter plate reader; gray=BSA; light gray=his-Fc;

[0033] dark gray=LRP5 FIGS. 5A and 5B. Phage clonal ELISA of synthetic antibodies targeting LRP6. The results demonstrate the synthetic antibodies bound to LRP6. The absorbance was measured spectrophotometrically at 450 nm in a microtiter plate reader; black=BSA; gray=Fc; light gray=LRP6-Fc.

[0034] FIG. 6. Modalities of tetravalent binding antibody molecules. Illustrated are: a diabody-Fc-diabody format having an FZD-binding monospecific diabody on the N-terminal of the Fc domain and a LPR5/6-binding bispecific diabody on the C-terminal of the Fc domain; a Diabody-Fc-scFv format having an N-terminal LPR5/6-binding bispecific diabody and two C-terminal FZD binding scFv; an IgG-diabody format having two FZD-binding Fabs forming an N-terminal binding domain and a bispecific LRP5/6 binding diabody forming the C-terminal binding domain; an IgG-scFv format having two FZD-binding Fabs forming an N-terminal binding domain and two LRP5/6 binding scFvs forming the C-terminal binding domain, and; a diabody-Fc-Fab format having a bispecific LRP5/6 binding diabody forming the N-terminal binding domain and two FZD-binding Fabs forming the C-terminal binding domain, wherein the Fabs are linked to the CH3 of the Fc domain via the Fab variable heavy region. It is specifically contemplated that in an alternate diabody-Fc-Fab format the Fabs are linked to the CH3 of the Fc domain via the Fab variable light region. The various domains of the tetravalent molecules, VL, VH, CH1, CH2, CH3, CL1 and Fc, are joined via linkers, e.g., peptide linkers. The Fc domain, is formed by the dimerization of the CH2 and

[0035] CH3 domains of the Hole construct Fc region and Knob construct Fc region. The various domains of the tetravalent molecules, VL, VH, CH1, CH2, CH3, CL1 and Fc, are joined via linkers, e.g., peptide linkers.

[0036] FIG. 7. FZD4 Agonist having a Diabody-Fc-Fab format. The Diabody-Fc-Fab format having an LRP5-binding bispecific diabody forming a bivalent bispecific N-terminal LRP5-binding domain and two FZD4-binding Fabs forming a bivalent monospecific C-terminal FZD4-binding domain and an Fc region with attenuated effector functions due to amino acid mutations, e.g., N297G (NG) and D265A, (DANG) variants. The various domains of the tetravalent molecules, VL, VH, CH1, CH2, CH3, CL1 and Fc, are joined via linkers, e.g., peptide linkers.

[0037] FIGS. 8A and 8B. FZD4 Agonists having a Diabody-Fc-Fab format (ANT) bind FZD4 with high selectivity. FIG. 8A depicts the apparent selectivity of the FZD4 Agonists for the recombinant extracellular domain (ECD) of 9 of the 10 FZD as determined by biolayer interferometry (BLI). FIG. 8B demonstrates FZD agonists do not recognize common non-specific antigens. The FZD Agonists were tested at 100 nM for binding to a panel of antigens as described in Mouquet et al. Polyreactivity increases the apparent affinity of anti-HIV antibodies by heteroligation. Nature. 2010 September; 467(7315):591-595. DOI: 10.1038/nature09385, PMC3699875, and Jain T. et al. Biophysical properties of the clinical-stage antibody landscape. Proceedings of the National Academy of Sciences of the United States of America. 2017 January; 114(5):944-949. DOI: 10.1073/pnas.1616408114, PMC5293111.

[0038] FIGS. 9A and 9B. FZD4 Agonists (ANT) having a Diabody-Fc-Fab format (having a LRP-binding bispecific diabody and two FZD4-binding Fabs) are stable and monomeric in solution. FIG. 9A presents the results of an analytical SEC analysis of FZD agonists as compared to trastuzumab IgG. FIG. 9B presents the results of differential scanning fluorimetry demonstrating that the FZD4 Agonists in the Diabody-Fc-Fab format have thermal denaturation profiles similar to that of trastuzumab, whereas a first generation diabody-Fc-diabody FZD4 modality (CM0199) is less optimal.

[0039] FIG. 10. FZD4-LRP5 specific FZD4 Agonists having the Diabody-Fc-Fab format (ANT). FZD4-LRP5 specific FZD4 Agonists in this format stimulate FZD4 in mouse endothelial cell line (bEND3.1) and lead to an increase in Axin2 (beta catenin target gene) gene transcription in a concentration-dependent manner.

[0040] FIG. 11A and FIG. 11B depicts a FZD4-LRP5 specific agonist having the diabody-fc-diabody format promotes endothelial cell barrier functions in a mechanism opposing VEGF-induced permeability. FIG. 11A depicts Immunofluorescence of ZO-1/CLDN3 and ZO-1/CLDN5 localization on bEnd.3 cell junctions. bEnd.3 cells were treated or not with 30 nM of F4L5.13 (aka CM0199) and Norrin (NDP) in the presence or absence of VEGF (100 ng/ml) for 1h. Starting from the top row and working downward: NT (non-treated) show no change in permeability; VEGF treatment of bEND3.1 cells leads to junction disassembly as seen by loss of plasma membrane staining of CLDN3, CLDN5 and ZO-1; Co-treatment of cells with VEGF and the FZD4 agonist CM0199 (F4L5.13) leads to a near-complete rescue of the effect of VEGF alone; the last row of FIG. 11A shows co-treatment of cells with VEGF and NDP and similarly leads to a near-complete rescue of the effect of VEGF alone, suggesting that the FZD4 Agonists described herein function as Norrin and Wnt7a/b mimetic molecules. FIG. 11B shows a transendothelial permeability assay quantifying the passage of FITC-dextran through a monolayer of bEnd.3 cells. Passage of FITC-dextran was measured after exposure of bEnd.3 cells to 100 ng/ml VEGF, 30 nM F4L5.13 or both or pretreated with VEGF for 1 h before treating with F4L5.13 for 1 h. Data are presented as mean±SD, n=5 independent experiments. Significance was calculated by one-way ANOVA with Bonferroni's multiple comparisons test (*P<0.05 as compared to VEGF treatment).

[0041] FIG. 12. Single point ELISA. FZD5 antibodies that bind the extracellular domain of FZD5 at a site overlapping with 2919 identified from affinity maturation libraries. New FZD5 antibodies bind FZD5 at a site overlapping with 2919 identified from affinity maturation libraries. Single point ELISAs were performed on 96-well Maxisorp plates coated with the ECDs of human FZD5 protein in the presence or absence of a saturating concentration of 2919 IgG. The absorbance was measured spectrophotometrically at 450 nm in a microtiter plate reader; white with black stripes=BSA; black with white stripes=Fc; gray=FZD5+blocking antibody; black=FZD5.

[0042] FIG. 13. Single point ELISA. demonstrates new FZD5 antibodies from 2928 affinity maturation library selectively bind FZD5. New FZD5 antibodies from 2928 affinity maturation library selectively bind FZD5. Single point ELISAs were performed on 96-well Maxisorp plates coated with the ECDs of human FZD2, FZD5, or FZD8 protein. The absorbance was measured spectrophotometrically at 450 nm in a microtiter plate reader; black with white stripes=Fc; white with black stripes=FZD2; gray=FZD8; black=FZD5.

[0043] FIG. 14. Luciferase assay. Pan-FZD/LRP6 ANT9 and FZD5-specific/LRP6 ANT59 activate Wnt signaling in cells. TOPFLASH cells were treated overnight with varying concentrations of FZD agonist or a non-targeting control molecule (CM0156) and TCF/LEF-driven luciferase expression was measured using a standard luciferase assay. Both molecules are able to activate FZD-mediated luciferase expression in a concentration-responsive manner. ANT9, which is able to bind to 7 of the 10 FZD receptor subtypes produces a higher maximal activation signal than the FZD5-specific ANT59.

[0044] FIG. 15. Original format ANT39 and inverted format ANT39i. The FZD4 Agonist ANT39 having a Diabody-Fc-Fab format and FZD4 Agonist ANT39i having an IgG-Diabody format (having two FZD-binding Fabs forming an N-terminal binding domain and a bispecific LRP5/6 binding diabody forming the C-terminal binding domain) and an Fc domain. The FZD binding domain of ANT39i comprises two Fab fragments attached to the N-terminus of the Fc domain and each Fab binds an FZD. The LRP5/6 co-receptor binding domain is attached to the C-terminus of the Fc domain and is composed of a diabody that binds two different sites on the co-receptor, e.g., a Wnt1 site (E1-E2) and a Wnt3 site (E3-E4) on LRP5/6. The Fabs may be specific for a particular FZD, e.g. FZD4, or may be pan-specific, binding to more than one FZD, e.g., to FZD4 and one or more other FZD. The Fc region may have attenuated effector functions due to amino acid mutations, e.g., N297G (NG) and D265A, (DANG) variants. The various domains of the tetravalent molecules, VL, VH, CH1, CH2, CH3, CL1 and Fc, are joined via linkers, e.g., peptide linkers.

[0045] FIG. 16A depicts FZD4 Agonist ANT39 having a Diabody-Fc-Fab format (having an LRP5-binding bispecific diabody forming a bivalent bispecific N-terminal LRP5-binding domain and two FZD4-binding Fabs forming a bivalent monospecific C-terminal FZD4-binding domain) with the Fc region having attenuated effector functions due amino acid mutations to N297G and D265A (DANG) variants or L234A, L235A, P331S (LALAPS) variants, and with the Fc region further comprising knob-in-hole heterodimerization variants Merrimack, Merchant or Merchant S:S (Merrimack CH3 mutations as described in WO2018/026942A1, Merchant CH3 mutations as described in Merchant A. M. et al Nature Biotechnology 1998 vol 16 p 677-681). FIG. 16A discloses SEQ ID NOS 886, 892, 891, 886, 892, 891, 886, 892, 891, 886, 892, and 891, respectively, in order of appearance. FIG. 16B depicts FZD4 Agonist ANT39i having an IgG-Fc-Diabody format (having two Fab fragments attached to the N-terminus of the Fc domain, each Fab binding to an FZD, and a LRP5/6 co-receptor binding domain attached to the C-terminus of the Fc domain that is composed of a diabody that binds two different sites on the co-receptor) and an Fc region with attenuated effector functions due to DANG or LALAPS variants, and Merrimack, Merchant or Merchant S:S heterodimerization variants. FIG. 16B discloses SEQ ID NOS 891, 886, 891, 886, 891, 886, 891, and 886, respectively, in order of appearance.

[0046] FIG. 17. Thermostability of ANT39 variants. FIG. 17 presents the results of differential scanning fluorimetry experiments demonstrating that the LALA variant of FZD4 agonist ANT39 (ANT39 LALA) has improved thermal stability relative to the parental ANT39 (containing DANG mutations in the Fc). Specifically, the LALA variant showed an improved thermal stability that is closer to the profile of a variant of Trastuzumab that contains the same Knob/Hole Fc mutations as the ANT.

[0047] FIG. 18. FZD4 Agonist ANT42 having a Diabody-Fc-Fab format. FZD4 Agonist ANT42 having an LRP5-binding bispecific diabody forming a bivalent bispecific N-terminal LRP5-binding domain and two FZD4-binding Fabs forming a bivalent monospecific C-terminal FZD4-binding domain with the Fc region having attenuated effector functions due amino acid mutations to N297G and D265A (DANG) variants or L234A, L235A, P331S (LALAPS) variants, and with the Fc region further comprising knob-in-hole heterodimerization variants Merrimack, Merchant or Merchant S:S (Merrimack CH3 mutations as described in WO2018/026942A1, Merchant CH3 mutations as described in Merchant A. M. et al Nature Biotechnology 1998 vol 16 p 677-681). And FZD4 Agonist ANT42i having an IgG-Fc-Diabody format (having two Fab fragments attached to the N-terminus of the Fc domain, each Fab binding to an FZD, and a LRP5/6 co-receptor binding domain attached to the C-terminus of the Fc domain that is composed of a diabody that binds two different sites on the co-receptor) and an Fc region with attenuated effector functions due to DANG or LALAPS variants, and Merrimack, Merchant or Merchant S:S heterodimerization variants. FIG. 18 discloses SEQ ID NOS 886, 892, 891, 891, 886, 886, 892, 891, 891, 886, 886, 892, 891, 891, 886, 886, 892, 891, 891, and 886, respectively, in order of appearance.

[0048] FIG. 19. Antibody modalities tested for FZD agonism. A) Diabody-Fc-Diabody, VH and VL were tested both FZD or LRP binding variable domains; B) Diabody-Fc-scFv; C) scFv-Fc-Diabody; D) scFv-Fc-scFv; E) IgG-Diabody; F) IgG-scFv; G) Diabody-Fc-Fab; H) Diabody-CH3-Diabody; I) Fab-Diabody. In FIG. 19, molecules B-F, H-I, comprise N-terminal variable domains that bind LRP and the C-terminal variable domains bind FZD. In FIG. 19, molecule G comprises a variable domain at the N-terminal that binds FZD and a variable domain at the C-terminal that binds LRP. These antibody formats marked with an * were tested using a Knobs-in-Holes Fc.

[0049] FIG. 20. Multiple antibody architectures are able to elicit potent FZD agonism. Paratopes targeting pan-FZD and LRP6 were configured in various arrangements as described in table 20. Canonical Wnt pathway stimulation by each antibody was determined on wild-type HEK cells expressing the TOPFLASH reporter in a blinded manner by two different scientists. Data are presented as mean±SD and are representative of 4 different experiments.

[0050] FIG. 21. Expression Titers of various FZD agonist modalities. Various FZD agonist modalities were expressed in HEK cells, purified via protein A chromatography, and expression titer was determined based on the absorbance at 280 nm. EC50 for FZD activation was determined on wild-type HEK cells expressing the TOPFLASH reporter in a blinded manner by two different scientists.

[0051] FIG. 22. Organoid viability Assay. Mouse small intestine organoids were grown in the presence of 1 μM LGK-974 to block endogenous Wnt secretion and treated with PBS, Wnt3a conditioned media or FLAg molecules as indicated. Left, representative images from n=3 independent experiments. Right, quantification of organoid viability via CellTiter-Glo luminescence assay. Bars represent mean +/− standard error from 3 independent experiments.

[0052] FIG. 23. Mouse colon histology. Histological appearance of the mouse colon following DSS treatment cycle (7 days 2% DSS, 3 days 0.5% DSS) with intraperitoneal injection of either control IgG or ANT59 (10 mg/kg) on days 4 and 7. (A) Images captured at 20× magnification showing overall architecture. (B) Images captured at 100× showing rescue of mucosal integrity with ANT59 treatment.

[0053] FIG. 24. (A) Body weight changes in mice throughout DSS treatment cycle (7 days 2% DSS, 3 days 0.5% DSS) with intraperitoneal injection of either control CM0156, PanFZD agonist or ANT59 (10 mg/kg) on days 4 and 7. (B) Left: Representative images of dissected colons from 6-8 mice per treatment group with centimeter scale for comparison. Right: colon length from each treatment group with bar representing mean colon length +/−S.D. and individual data points displayed. *** indicates p<0.0001 in one-way ANOVA, H₂O indicates normal water (no DSS).

[0054] FIG. 25. Characterization of FZDS/LRP6 ANTs. ANTs were expressed in HEK cells, purified via protein A chromatography, and expression titer was determined based on the absorbance at 280 nm. Using biolayer interferometry, the apparent affinity (avidity) of each molecule for recombinant Fc-fused human FZDS was determined and selectivity against other human FZDs was measured. Dose-response curves for the activation of a LEF/TCF reporter gene in FZD-knockout (1,2,4,5,7) HEK293 cells overexpressing FZDS. Cells were seeded in 96-well dishes for 24 hours, then treated as indicated for 17 hours. Reporter activation was assessed using the Dual-Luciferase Reporter Assay System (Promega). Data are presented as mean±SD for technical duplicates and representative of n=3 independent experiments.

[0055] FIG. 26. Characterisation of eight ANT39 variants. FIG. 26 presents the results of SEC-HPLC purity performed after purification using Protein A Sepharose at 280 nm wavelength. The eight ANT39 variants were produced by transfecting CHO cells with DNA at a 2:1:3 Knob chain: Hole chain: Light chain ratio. The percentage of correctly paired monomer (4 min time point) present is labelled on each graph.

[0056] FIG. 27. Characterisation of four ANT39 variants produced at a 15 litre scale. FIG. 27 present the results of SEC-HPLC purity of samples after polishing. The percentage of correctly paired monomer (4 min time point) present is labelled on each graph.

[0057] FIG. 28. Characterisation of four ANT39 variants produced at a 15 litre scale. FIG. 28 presents the results of mass spectrometry analysis. The correctly paired monomers are shown at 200,000 mass.

[0058] FIG. 29. Characterisation of four ANT39 variants produced at a 15 litre scale. FIG. 29 presents the results of a cell-based beta-catenin reporter assay. TOPFLASH cells were treated overnight with varying concentrations of FZD agonist or a non-targeting control molecule (CM0156) and TCF/LEF-driven luciferase expression was measured using a standard luciferase assay. All four ANT39 variants were able to activate FZD-mediated luciferase expression in a concentration-responsive manner.

[0059] FIG. 30. Characterisation of four ANT39 variants after subjection to stress. TOPFLASH cells were treated overnight with varying concentrations of FZD agonist or a non-targeting control molecule (ANT67) and TCF/LEF-driven luciferase expression was measured using a standard luciferase assay. FIG. 30A presents the results of the control molecules (non-targeting molecule ANT67 and positive control versions of ANT39 DANG and ANT39 LALAPS) and the four ANT39 variants before stress was applied (TO). FIG. 30B presents results of the control molecules (without stress) and the four ANT39 variants after four weeks of thermal stress (40C-4W). FIG. 30C presents results of the control molecules (without stress) and the four ANT39 variants after 24 hours of oxidative stress (AAPH-24h).

### DETAILED DESCRIPTION OF THE INVENTION

[0060] Described herein are tetravalent binding antibody molecules comprising an Fc domain, with or without effector function, a bivalent FZD binding domain and a bivalent LRP-binding domain, wherein the binding domains are attached to opposite ends of the Fc domain. In an embodiment, the FZD binding domain is attached to the carboxy terminus of the Fc region and the LRP co-receptor binding domain is attached to the amino terminus of the Fc domain. Alternatively, the FZD binding domain is attached to the amino terminus of the Fc region and the co-receptor binding domain is attached to the carboxy terminus of the Fc domain. The binding domains may be attached directly to the Fc domain or attached to the Fc domain via a linker. The FZD binding domain may bind to one or to more than one FZD receptor, i.e., one or more of FZD1, FZD2, FZD3, FZD4, FZD5, FZD6, FZD7, FZD8, FZD9, and FZD10. In an embodiment of the invention the FZD binding domain is bivalent and comprises a diabody or comprises a scfv, a V_{H}H fragment, or an Fab fragment or combinations thereof that bind FZD, and the co-receptor binding domain is bivalent and comprises a diabody or a V_{H}H fragment, an Fab, or a scFv or combinations thereof that bind the LRP5/6 co-receptor. In an embodiment of the invention the FZD binding domain is attached to the carboxy-terminus of the Fc domain and comprises two scfv, two V_{H}H fragments, two Fab fragments or a diabody that bind FZD, and the co-receptor binding domain attached to the amino terminus of the Fc domain comprises a diabody, two V_{H}H fragments or two scFvs that binds to the LRP5/6 co-receptor. When attached to the carboxy terminus of the Fc domain the FZD-binding Fabs are linked to the CH3 of the Fc domain via the Fab variable heavy region or variable light region. In other embodiments the FZD binding domain is attached to the amino terminus of the Fc domain and is comprised of two Fabs and the LRP5/6 co-receptor binding domain is attached to the carboxy terminus of the Fc domain and is comprised of a diabody or two scFvs that bind the co-receptor.

[0061] FIG. 6 illustrates a tetravalent binding antibody molecule of this invention in the Diabody-Fc-scFv format having a LRP5/6 co-receptor binding domain, an Fc domain, and a FZD binding domain. The Diabody-Fc-scFv comprises (i) an Fc domain, (ii) a bispecific diabody attached to the N-terminal of the Fc domain that binds two different sites on the co-receptor, e.g., a Wnt1 (E1-E2) site on LRP5/6, and a Wnt3 site (E3-E4) on LRP5/6, and (iii) a FZD binding domain comprising two FZD-binding scFv fragments attached to the carboxy terminus of the Fc domain. The scFv may be specific for a particular FZD, e.g. FZD4, or may be pan-specific, binding to more than one FZD, e.g. to FZD4 and one or more other FZD.

[0062] An embodiment of this invention is a tetravalent binding antibody molecule in a Diabody-Fc-scFv format having (i) an Fc domain, (ii) a LRP5/6 co-receptor binding domain that comprises a bispecific diabody that binds two different sites on the co-receptor, e.g., a Wnt1 (E1-E2) site on LRP5/6, and a Wnt3 site (E3-E4) on LRP5/6, wherein the diabody is attached to the amino terminus of the Fc domain and (iii) a FZD binding domain, attached to the carboxy terminus of the Fc domain comprising two scFv fragments each binding FZD. The scFv may be specific for the FZD, or may be pan-specific, binding to the FZD and one or more other FZD.

[0063] FIG. 6 also illustrates a tetravalent binding antibody molecule of this invention in the IgG-diabody format having (i) an Fc domain, (ii) a FZD binding domain that comprises of two Fab fragments attached to the N-terminus of the Fc domain, each Fab binding to an FZD, and (iii) a LRP5/6 co-receptor binding domain attached to the C-terminus of the Fc domain that is composed of a diabody that binds two different sites on the co-receptor, e.g., a Wnt1 site (E1-E2) and a Wnt3 site (E3-E4) on LRP5/6. The Fabs may be specific for a particular FZD, e.g. FZD4, or may be pan-specific, binding to more than one FZD, e.g., to FZD4 and one or more other FZD.

[0064] An embodiment of this invention is a tetravalent binding antibody molecule in an IgG-Diabody format comprising (i) an Fc domain, (ii) an N-terminal binding domain for a FZD, comprising two FZD-binding Fabs and (ii) a C-terminal binding domain for a LRP5 and/or LRP6 co-receptor, comprising a LRP5/6 coreceptor-binding diabody. This FZD Agonist in the IgG-Diabody format comprises,

(1) a first and second heavy chain monomer, wherein each heavy chain monomer comprises a single-chain polypeptide comprising from N-terminus to C-terminus:
[0065] (a) a heavy chain variable domain (VH) that binds a FZD, linked to
[0066] (b) a heavy chain constant region domain 1 (CH1 domain), linked to
[0067] (c) an Fc region (or fragment thereof comprising a constant heavy chain domain 3 (CH3 domain)), linked to
[0068] (d) a peptide comprising a VH that binds a LRP5/6 co-receptor, linked to a light chain variable domain (VL) that binds a LRP5/6 co-receptor, and
   (2) a first and second light chain monomer, each light chain monomer comprising from N terminus to C terminus a VL that binds the FZD, linked to a constant light chain domain 1 (CL1 domain).

[0069] The first and second heavy chain monomers dimerize via their Fc regions, or fragments thereof. The linker between the VH and VL that bind the LRP5/6 is of a length that promotes the pairing of the VH and VL of the first heavy chain monomer with the VL and VH of the second heavy chain monomer thereby forming a LRP5/6 co-receptor binding diabody. The FZD-binding Fabs are formed by the pairing of each heavy chain monomer with a light chain monomer such that the VH that binds FZD4 and CH1 of each of the heavy chain monomer, pairs with the VL that binds FZD4 and CL1 of the light chain monomers. In this IgG-Diabody format, the Fabs form the FZD4-binding domain on the N-terminus of the Fc domain and the diabody forms the co-receptor-binding domain on the C-terminus of the Fc domain. The Fabs may be specific for one FZD, e.g., FZD4 or FZD5, or may be pan-specific, binding to more than one FZD, e.g., to FZD4 and/or FZD5, and in some cases more FZD. The Fc regions may dimerize via a knob-in-hole configuration. Methods for dimerizing peptides via a knob-in-hole configuration are described in WO2018/026942, inventors Van Dyk et al., Carter P. (2001) J. Immunol. Methods 248, 7-15; Ridgway et al. (1996) Protein Eng. 9, 617-621; Merchant, et al. (1998) Nat. Biotechnol. 16, 677-681, and; Atwell et al., (1997) J. Mol. Biol. 270, 26-35. The Fc regions may be Merrimack (knob chain: Q347M, Y349F, T350D, T366W and L368M; hole chain: 53541, E357L, T366S, L368A and Y407V), Merchant (knob chain: T366W; hole chain: T336S, L368A and Y407V) or Merchant S:S (Merchant mutations with additional S354C variant in the knob chain and Y349C in the hole chain). The Fc regions may also contain mutations that alter their effector function, e.g., the Fc region may have attenuated effector functions due to amino acid mutations, e.g., DANG variants and LALAPS variants.

[0070] Although in FIG. 6 the peptides forming the diabody in the IgG-Diabody format are linked to the C-terminal of the Fc domain via their VH domain in a VH-VL orientation (N terminal to C terminal), in some embodiments, the peptides forming the diabody are linked to the C-terminal of the Fc domain via their VL domains in a VL-VH orientation (N-terminal to C-terminal). And, although the heavy chains are depicted as comprising a VH domain and a CH1 domain linked to the N-terminal of the Fc domain and the light chains are depicted as comprising a VL domain and CL1 domain to form the Fabs, in some embodiments (Diabody-Fc-Fab in FIG. 6 and FIG. 7A) the diabodies are fused to the N-terminus of the Fc and the Fabs are fused to the C-terminus of the Fc. In order to do this, the CH3 domain of the Fc is fused directly to the heavy chain of the Fab via its VH domain (VH-CH1) or directly to the light chain via its VL domain (VL-CL) and where the light and heavy chains still associate to form the Fabs.

[0071] FIG. 6 illustrates a tetravalent binding antibody molecule in a Diabody-Fc-Fab configuration having an LRP5/6-binding bispecific bivalent diabody forming the N-terminal binding domain, and two FZD-binding Fabs forming the C-terminal binding domain. The Fabs may be specific for a particular FZD, e.g. FZD4, or may be pan-specific, binding to more than one FZD, e.g. FZD4 and one or more other FZD. See also FIG. 7A, which illustrates a tetravalent binding antibody molecule in the Diabody-Fc-Fab format having an Fc in a knob-in-hole (KiH) configuration and an LRP5-binding bispecific bivalent diabody forming the N-terminal binding domain, and two FZD4-binding Fabs forming the C-terminal binding domain. Although FIGS. 6 and 7A illustrates the Fabs linked to the CH3 of the Fc domain (at the C-terminus) via the Fab variable heavy domain (VH), it is specifically contemplated that in an alternate diabody-Fc-Fab format the Fabs are linked to the CH3 of the Fc domain via the Fab variable light domain (VL). The various domains of the tetravalent molecules, VL, VH, CH1, CH2, CH3, CL1 and Fc, are joined via linkers, e.g., peptide linkers.

[0072] Also an embodiment of this invention is a tetravalent binding antibody molecule in the Diabody-Fc-Fab format comprising (i) an Fc domain, (ii) an N-terminal binding domain comprising a diabody that binds to the co-receptor, e.g., LRP5 and/or LRP6 co-receptor and (ii) a C-terminal binding domain comprising two Fab that bind to one or more FZD, e.g., FZD4 or FZD5. This FZD Agonist in the Diabody-Fc-Fab format comprises,

(1) a first and second heavy chain monomer, wherein each heavy chain monomer comprises a single-chain polypeptide comprising, from N-terminus to C-terminus:
[0073] (a) a peptide comprising a heavy chain variable (VH) domain that binds a LRP5/6 co-receptor and a light chain variable (VL) domain that binds a LRP5/6 co-receptor, linked to
[0074] (b) an Fc region (or fragment thereof comprising a constant heavy chain domain 3 (CH3 domain)), linked to
[0075] (c) a VH domain that binds a FZD, linked to
[0076] (d) a CH1 domain, and
   (2) a first and second light chain monomer each light chain monomer comprising from N-terminus to C-terminus a VL domain that binds FZD, and a constant light chain domain 1 (CL1).

[0077] The first and second heavy chain monomers dimerize via the Fc regions or fragments thereof and a bivalent LRP5/6-binding diabody is formed by the pairing of the VH domain and VL domain that bind LRP5/6 of the first heavy chain monomer with the VL domain and VH domain that bind LRP5/6 of the second heavy chain monomer. The two FZD-binding Fabs are formed by the pairing of each heavy chain monomer with a light chain monomer such that the VL that binds the FZD and the CL1 of a light chain monomer pairs with the VH that binds the FZD and the CH1 of each of the heavy chain monomers. In this Diabody-Fc-Fab format, the diabody forms the LRP5/6 co-receptor binding domain on the amino terminus of the tetravalent molecule and the two Fabs form the FZD binding domain on the C-terminus of the tetravalent binding antibody molecule. The Fc regions may dimerize via a knob-in-hole configuration.

[0078] In an embodiment of the invention is a tetravalent binding antibody molecule comprising a bivalent, bispecific LRP5 binding domain, wherein
[0079] (a) in the first heavy chain monomer, the VH that binds LRP5 comprises CDR-H1 of SEQ ID NO: 528, CDR-H2 of SEQ ID NO: 553 and CDR-H3 of SEQ ID NO: 586 and the VL that binds LRP5 comprises CDR-L1 of SEQ ID NO: 1, CDR-L2 of SEQ ID NO: 491 and CDR-L3 of SEQ ID NO: 510
   [0080] and the VH that binds FZD4 comprises the FZD4 VH CDRs CDR-H1 of SEQ ID NO: 24, a CDR-H2 of SEQ ID NO: 61 and a CDR-H3 of SEQ ID NO: 90
[0081] (b) in the second heavy chain monomer, the VH that binds LRP5 comprises CDR-H1 of SEQ ID NO: 536, CDR-H2 of SEQ ID NO: 566 and CDR-H3 of SEQ ID NO: 603 and the VL that binds LRP5 comprises CDR-L1 of SEQ ID NO: 1, CDR-L2 of SEQ ID NO: 2 and CDR-L3 of SEQ ID NO: 493
   [0082] and the VH that binds FZD4 comprises the FZD4 VH CDRs CDR-H1 of SEQ ID NO: 24, a CDR-H2 of SEQ ID NO: 61 and a CDR-H3 of SEQ ID NO: 90
[0083] and
[0084] (c) in each of the third and fourth light chain monomers, the VL that binds FZD4 comprises the CDR-L1 of SEQ ID NO: 1, CDR-L2 of SEQ ID NO: 2 and CDR-L3 of SEQ ID NO: 12.

[0085] In an embodiment of the invention the first heavy chain monomer comprises
[0086] (a) a VH that binds LRP5 comprising CDR-H1 of SEQ ID NO: 536, CDR-H2 of SEQ ID NO: 566 and CDR-H3 of SEQ ID NO: 603;
[0087] (b) a VL that binds LRP5 comprising CDR-L1 of SEQ ID NO: 1, CDR-L2: of SEQ ID NO: 2 and CDR-L3 of SEQ ID NO: 493; and
[0088] (c) a VH that binds FZD4 comprising CDR-H1 of SEQ ID NO: 24, CDR-H2 of SEQ ID NO: 61 and CDR-H3 of SEQ ID NO: 90;
   wherein the first heavy chain monomer comprises a sequence which has at least 70% identity, such as 75% identity, such as 80% identity, such as 85% identity, such as 90% identity, such as 91% identity, such as 92% identity, such as 93% identity, such as 94% identity, such as 95% identity, such as 96% identity, such as 97% identity, such as 98% identity, such as 99% identity, such as 100% identity to any sequence selected from SEQ ID NOs: 908, 921 to 928, 937, 940 and 941.

[0089] In an embodiment of the invention the second heavy chain monomer comprises
[0090] (a) a VH that binds LRP5 comprising CDR-H1 of SEQ ID NO: 528, CDR-H2 of SEQ ID NO: 553 and CDR-H3 of SEQ ID NO: 586;
[0091] (b) a VL that binds LRP5 comprising CDR-L1 of SEQ ID NO: 1, CDR-L2: of SEQ ID NO: 491 and CDR-L3 of SEQ ID NO: 510; and
[0092] (c) a VH that binds FZD4 comprising CDR-H1 of SEQ ID NO: 24, CDR-H2 of SEQ ID NO: 61 and CDR-H3 of SEQ ID NO: 90;
   wherein the first heavy chain monomer comprises a sequence which has at least 70% identity, such as 75% identity, such as 80% identity, such as 85% identity, such as 90% identity, such as 91% identity, such as 92% identity, such as 93% identity, such as 94% identity, such as 95% identity, such as 96% identity, such as 97% identity, such as 98% identity, such as 99% identity, such as 100% identity to any sequence selected from SEQ ID NOs: 929 to 936 and 944 to 951.

[0093] In an embodiment of the invention the third and fourth light chain monomers comprise a VL that binds FZD4 comprising CDR-L1 of SEQ ID NO: 1, CDR-L2 of SEQ ID NO: 2 and CDR-L3 of SEQ ID NO: 12, wherein the third and fourth light chain monomers comprise a sequence which has at least 70% identity, such as 75% identity, such as 80% identity, such as 85% identity, such as 90% identity, such as 91% identity, such as 92% identity, such as 93% identity, such as 94% identity, such as 95% identity, such as 96% identity, such as 97% identity, such as 98% identity, such as 99% identity, such as 100% identity to SEQ ID NO: 909 or 952. Methods for dimerizing peptides via a knob-in-hole configuration are described in WO2018/026942, inventors Van Dyk et al., Carter P. (2001) J. Immunol. Methods 248, 7-15; Ridgway et al. (1996) Protein Eng. 9, 617-621; Merchant, et al. (1998) Nat. Biotechnol. 16, 677-681, and; Atwell et al., (1997) J. Mol. Biol. 270, 26-35. The Fc regions may be Merrimack (knob chain: Q347M, Y349F, T350D, T366W and L368M; hole chain: S354I, E357L, T366S, L368A and Y407V), Merchant (knob chain: T366W; hole chain: T336S, L368A and Y407V) or Merchant S:S (Merchant mutations with additional S354C variant in the knob chain and Y349C in the hole chain). The Fc regions may also contain mutations that alter their effector function, e.g., the Fc region may have attenuated effector functions due to amino acid mutations, e.g., DANG variants, LALA and LALAPS variants. In an embodiment of the invention the Fc regions of the heavy chain monomers described previously comprise Merrimack knob-in-hole mutations and DANG amino acid mutations. In an embodiment of the invention the Fc regions of the heavy chain monomers described previously comprise Merrimack knob-in-hole mutations and LALAPS amino acid mutations. In an embodiment of the invention the Fc regions described previously of the heavy chain monomers comprise Merchant knob-in-hole mutations and LALAPS amino acid mutations. In an embodiment of the invention the Fc regions of the heavy chain monomers described previously comprise Merchant S:S knob-in-hole mutations and LALAPS amino acid mutations.

[0094] In an embodiment of the invention the polypeptides comprising monomer chains further comprise a signal peptide. In an embodiment of the invention the polypeptides comprising monomer chains do not comprise a signal peptide. The signal peptide may have been cleaved from the immature chain to produce the mature chain.

[0095] Although in FIGS. 6 and 7A the peptides forming the diabody in the Diabody-Fc-Fab format are linked to the Fc domain via their VL domains, thus in a VH-VL orientation (from N-terminal to C-terminal), in some embodiments the orientation can be switched such that the peptides forming the diabody are linked to the N-terminal of the Fc domain via their VH domains, thus in a VL-VH orientation (from N-terminal to C-terminal). Also, although the heavy chains in the Diabody-Fc-Fab format are depicted as comprising a VH domain and a CH1 domain, which pair with the light chain comprising a VL and CL1 domain to form the Fabs, it is also contemplated that in some embodiments the variable and constant domains are switched such that the heavy chains comprise a VL domain and a CL1 domain and the light chains comprises the VH domain and CH1 domain and the heavy and light chains still pair to form the Fabs.

[0096] In an embodiment of this invention the binding moiety of the FZD binding domain is derived from an antibody, or an antibody fragment, that binds specifically to one FZD, e.g. FZD4 or FZD5, or is pan-specific interacting with a specific FZD, e.g. FZD4 or FZD5, and one or more additional FZD receptors (an FZD source antibody), and the co-receptor binding domain comprises a binding moiety that is derived from an antibody or antibody fragment that binds to a LPR5 and/or LRP6 (a LRP5/6 coreceptor source antibody). In an embodiment of the invention the FZD-binding antibodies bind to an extracellular cysteine rich domain (CRD) of the FZD receptor. The antibody that binds FZD may be an antibody that binds the FZD receptor and antagonizes Wnt signaling or inhibits binding of a Wnt ligand to the FZD receptor. The antibody that binds FZD may be an antibody that binds the FZD receptor without antagonizing or inhibiting binding of a Wnt ligand to the FZD receptor. The antibody that binds FZD may be an antibody that binds FZD and enhances Wnt signaling. The antibody that binds the LRP5/6 co-receptor may be an antibody that binds the LRP5/6 co-receptor and antagonizes Wnt signaling or inhibits binding of a Wnt ligand to the co-receptor, or the antibody that binds the LRP5/6 co-receptor may be an antibody that binds the co-receptor without antagonizing Wnt or Norrin signaling or inhibiting binding of a Wnt or Norrin ligand to the co-receptor.

[0097] In an embodiment of this invention the LRP5/6 co-receptor binding domain binds to a single epitope on a co-receptor, e.g., an epitope that binds to the Wnt1 (E1-E2) or Wnt3 (E3-E4) interacting domain of LRP5/6. In an embodiment of this invention the LRP5/6 co-receptor binding domain binds to two epitopes within the co-receptor, e.g., a paratope that binds to the Wnt1 (E1-E2) interacting epitope and a paratope that binds to Wnt3 (E3-E4) epitope of LRP5/6. In an embodiment of this invention the multivalent binding molecule comprises a Fc domain, wherein the Fc domain is the Fc domain of an immunoglobulin or a fragment thereof comprising the CH3 domain. In an embodiment of the invention the immunoglobulin is an IgG. In an embodiment of this invention the IgG is an IgG₁.

[0098] In an embodiment of this invention the LRP5/6 binding domain comprises a diabody comprising two peptides each comprising a heavy chain variable domain (VH) that binds to LRP5/6 linked to a light-chain variable domain (VL) that binds LRP5/6 wherein the binding domain is formed by pairing of the VH and the VL from one peptide to the VL and VH of the other peptide thereby forming the LRP5/6 binding domain.

[0099] In the tetravalent binding antibody molecules of this invention both of the binding domains are bivalent and one or both of the bivalent binding domains may be bispecific for the respective FZD receptor, e.g., FZD4 or FZD5, or LRP5/6 co-receptor. For example, the binding molecule may comprise an FZD binding domain that is bivalent and monospecific (each binding site binding to the same epitope) and the LRP 5/6 binding domain is bivalent and bispecific, binding to two different epitopes (the Wnt1 (E1-E2) and Wnt3 (E3-E4) sites on the LRP5/6 ectodomain). In an embodiment of this invention both binding domains are bivalent and bispecific, each binding domain binding to two different epitopes on their respective target FZD receptor or LRP 5/6 co-receptor.

[0100] The VH and VL domains of the FZD binding domain of the tetravalent molecules of this invention may comprise the three light chain CDRs and three heavy chain CDRs of a FZD source antibody, e.g. the FZD4 or FZD5, binding antibodies of Table 1, Table 2 or Table 6, or three light chain CDRs and three heavy chain CDRs that are at least 50%, at least 55%, at least 60%, at least 75, at least. 80%, at least 85%, at least 90%, at least at least 95%, at least 96%, at least 97%, at least 98% or at least 99% identical to the CDRs of the FZD source antibody, e.g., the FZD4 antibodies of Table 1, Table 2 or Table 6, and still retain binding to the FZD or FZD5 receptor bound by the source antibody.

[0101] The VH and VL domains of the LRP5/6 co-receptor binding domain of the tetravalent molecules of this invention may comprise the three light chain CDRs and three heavy chain CDRs of an LRP5/6 co-receptor source antibody, e.g., the LRP5/6 binding antibodies of Table 3, Table 4 or Table 6, or three light chain CDRs and three heavy chain CDRs that are at least 50%, at least 55%, at least 60%, at least 75%, at least 80%, at least 85%, at least 90%, at least 95%, at least 96%, at least 97%, at least 98% or at least 99% identical to the VH and VL of the Wnt co-receptor source antibody, e.g., the LRP5/6 binding antibodies of Table 3, Table 4 or Table 6, and still bind to the LRP5/6 co-receptor.

[0102] In an embodiment of this invention the FZD binding domain of the tetravalent binding molecule of this invention binds FZD4 (an FZD4 Agonist) or FZD5 (FZD5 Agonist) or FZD4 and/or FZD5 and one or more other FZDs (a pan-FZD Agonist) and comprises the CDR-H1, CDR-H2 and CDR-H3 and the CDR-L1, CDR-L2 and CDR-L3 of the antibodies of Table 1, Table 2 or Table 6, or CDRs that are at least 50%, at least 55%, at least 60%, at least 75%, at least 80%, at least 85%, at least 90%, at least 95%, at least 96%, at least 97%, at least 98% or at least 99% identical to the CDR-H1, CDR-H2 and CDR-H3 and CDR-L1, CDR-L2 and CDR-L3 of the antibodies of Table 1, Table 2 or Table 6, and still bind to FZD4 or FZD5, and the LRP5/6 binding domain of the FZD4 Agonist or FZD5 Agonist or pan-FZD Agonist comprises the CDR-H1, CDR-H2 and CDR-H3 and CDR-L1, CDR-L2 and CDR-L3 of the antibodies of Table 3, Table 4 or Table 6 or the CDRs are at least 50%, at least 55%, at least 60%, at least 75%, at least 80%, at least 85%, at least 90%, at least 95%, at least 96%, at least 97%, at least 98% or at least 99% identical to the CDR-H1, CDR-H2 and CDR-H3 and CDR-L1, CDR-L2 and CDR-L3 of the antibodies in Table 3, Table 4 or Table 6, and still bind to LRP5 or LRP6.

[0103] In an embodiment, the tetravalent binding antibody molecule's FZD binding domain does not comprise a diabody, scFv, or Fab comprising the three heavy chain CDRs or three light chain CDRs of the FZD4-binding antibody 5044 in combination with a Wnt co-receptor binding domain comprising a diabody, scFv, or Fab comprising the three heavy chain CDRs and three light chain CDRs of LRP6-binding antibody 2542 and/or antibody 2539. In an embodiment, the tetravalent binding molecule does not comprise a diabody, scFv, or Fab, comprising the three heavy chain CDRs and three light chain CDRs of the FZD4-binding antibody 5027 in combination with a Wnt co-receptor binding domain comprising a diabody, scFv, or Fab comprising the three heavy chain CDRs and three light chain CDRs of LRP6-binding antibody 2542 and/or antibody 2539.

[0104] An embodiment of the invention is a polypeptide comprising a chain monomer of the tetravalent binding antibody molecule of the invention.

[0105] In an embodiment of the invention is a polypeptide comprising the first heavy chain monomer of the binding antibody molecule of the invention. In a further embodiment, the polypeptide comprises a sequence which has at least 70% identity, such as 75% identity, such as 80% identity, such as 85% identity, such as 90% identity, such as 91% identity, such as 92% identity, such as 93% identity, such as 94% identity, such as 95% identity, such as 96% identity, such as 97% identity, such as 98% identity, such as 99% identity, such as 100% identity to any sequence selected from SEQ ID NOs: 908, 921 to 928, 937, 940 and 941.

[0106] In an embodiment of the invention is a polypeptide comprising the second heavy chain monomer of the binding antibody molecule of the invention. In a further embodiment, the polypeptide comprises a sequence which has at least 70% identity, such as 75% identity, such as 80% identity, such as 85% identity, such as 90% identity, such as 91% identity, such as 92% identity, such as 93% identity, such as 94% identity, such as 95% identity, such as 96% identity, such as 97% identity, such as 98% identity, such as 99% identity, such as 100% identity to any sequence selected from SEQ ID NOs: 929 to 936 and 944 to 951 In an embodiment of the invention is a polypeptide comprising a light chain monomer of the binding antibody molecule of the invention. In a further embodiment, the polypeptide comprises a sequence which has at least 70% identity, such as 75% identity, such as 80% identity, such as 85% identity, such as 90% identity, such as 91% identity, such as 92% identity, such as 93% identity, such as 94% identity, such as 95% identity, such as 96% identity, such as 97% identity, such as 98% identity, such as 99% identity, such as 100% identity to SEQ ID NO: 909 or 952.

[0107] Also, an embodiment of this invention are the nucleic acid molecules encoding the tetravalent binding molecules described herein. An embodiment of this invention are the nucleic acid molecules encoding the polypeptides of the tetravalent binding molecules described herein comprising the heavy chain and light chain CDRs set forth in Tables 1, 2, 3, 4, 6. Also an embodiment of this invention are the nucleic acid molecules that encode the polypeptides of the tetravalent binding molecules, e.g., FZDS Agonists or FZD4 Agonists, of FIGS. 7A and 7B that comprise the CDRs of Table 6. Also, an embodiment of this invention are the nucleic acid molecules that encode VH and VL domains comprising respectively the heavy chain and light chain CDRs set forth in Tables 1, 2, 3, 4, and 6. The nucleic acid molecules can be inserted into a vector and expressed in an appropriate host cell and then the tetravalent binding antibody molecules may be isolated from the cells using methods well known in the art. As such, also an aspect of this invention are expression cassettes and vectors comprising the nucleic acid molecules that encode the polypeptides of the tetravalent binding molecules, e.g., FZD4 or FZDS Agonists, described herein, the VL and VH domains, the Fabs and the diabodies comprising the CDRs of set forth in Tables 1, 2, 3, 4, and 6, and the Fc domains described herein. An aspect of this invention are the host cells expressing these expression cassettes and vectors.

[0108] In an embodiment, the nucleic acid molecule encodes a polypeptide comprising a heavy chain monomer of the tetravalent binding antibody molecule of the invention. In a further embodiment, the nucleic acid molecule comprises a sequence which has at least 70% identity, such as 75% identity, such as 80% identity, such as 85% identity, such as 90% identity, such as 91% identity, such as 92% identity, such as 93% identity, such as 94% identity, such as 95% identity, such as 96% identity, such as 97% identity, such as 98% identity, such as 99% identity, to any one of SEQ ID NOs: 1030 to 1061. In a further embodiment, the nucleic acid comprises any one of SEQ ID NOs: 1030 to 1061. In a further embodiment the nucleic acid molecule consists of any one of SEQ ID NOs: 1030 to 1061.

[0109] In an embodiment the nucleic acid encodes a polypeptide comprising a light chain monomer of the tetravalent binding antibody molecule of the invention. In a further embodiment, the nucleic acid molecule comprises a sequence which has at least 70% identity, such as 75% identity, such as 80% identity, such as 85% identity, such as 90% identity, such as 91% identity, such as 92% identity, such as 93% identity, such as 94% identity, such as 95% identity, such as 96% identity, such as 97% identity, such as 98% identity, such as 99% identity, to SEQ ID NO: 1062 or 1063. In a further embodiment, the nucleic acid molecule comprises SEQ ID NO: 1062 or 1063. In a further embodiment, the nucleic acid molecule consists of SEQ ID NO: 1062 or 1063.

[0110] In an embodiment of the invention the nucleic acid encodes the first heavy chain monomer, the second heavy chain monomer and the third and fourth light chain monomers of the tetravalent binding antibody molecule of the invention.

[0111] In an embodiment of the invention is a set of one or more polynucleotides wherein each polynucleotide encodes at least one of the monomer chains of the tetravalent binding antibody molecule of the invention, such that all chains of said tetravalent binding antibody molecule are encoded. In a further embodiment of the invention, the set of one or more polynucleotides encodes two chains of the tetravalent binding antibody molecule. In a further embodiment of the invention, the set of one or more polynucleotides encodes three chains of the tetravalent binding antibody molecule. In a further embodiment of the invention, the set of one or more polynucleotides encodes four chains of the tetravalent binding antibody molecule.

[0112] In an embodiment of the invention the nucleic acid molecules encode polypeptides of the invention further comprising a signal peptide. In an embodiment of the invention the nucleic acid molecules encode polypeptides of the invention which do not comprise a signal peptide. As used in this invention, the term “vector” refers to a nucleic acid delivery vehicle or plasmid that can be engineered to contain a nucleic acid molecule, e.g., a nucleic acid sequence encoding the tetravalent binding antibody molecules described herein. The vector that can express protein when inserted with a polynucleotide is called an expression vector.

[0113] Vectors can be inserted into the host cell by transformation, transduction, or transfection, so that the carried genetic substances can be expressed in the host cell. Vectors are well known to the technical personnel in the field, including but not limited to: plasmid; phagemid; cosmid; artificial chromosome such as yeast artificial chromosome (YAC), bacterial artificial chromosome (BAC), or P1 derived artificial chromosome (PAC); phage such as λphage or M13 phage and animal viruses etc. Animal viruses may include but not limited to, reverse transcriptase virus (including lentivirus), adenovirus, adeno-associated virus, herpes virus (e. g. herpes simplex virus), chicken pox virus, baculovirus, papilloma virus, and papova virus (such as SV40). A vector can contain multiple components that control expression of the tetravalent binding antibody molecules described herein, including but not limited to, promoters, e.g., viral or eukaryotic promoters, e.g., a CMV promoter, signal peptides, e.g., TRYP2 signal peptide, transcription initiation factor, enhancer, selection element, and reporter gene. In addition, the vector may also contain replication initiation site(s). In an embodiment of this invention, the vector comprises a nucleic acid encoding a heavy chain of the tetravalent binding antibody molecule of the invention. In an embodiment, the vector comprises a nucleic acid encoding a light chain of the tetravalent binding antibody molecule of the invention. In an embodiment, the vector comprises nucleic acids encoding two heavy chain sequences and one light chain sequence. An embodiment of the invention is a set of one or more vectors which collectively comprise the set of one or more polynucleotides described previously, such that all chains of the tetravalent binding antibody molecule of the invention are encoded in the set of vectors.

[0114] As used in this invention, the term “host cell” refers to cells that can import expression cassettes and vectors, including but not limited to, prokaryotic cells such as Escherichia coli and Bacillus subtilis, fungal cells such as yeast and Aspergillus, insect cells such as S2 drosophila cells and Sf9, or animal cells, including human cells, e.g., fibroblast cells, CHO cells, COS cells, NSO cells, HeLa cells, BHK cells, or HEK293 cells. An embodiment of this invention is a host cell expressing a vector of the invention. An embodiment of this invention is a process for the production of a tetravalent binding antibody molecule of the invention using a vector.

[0115] An embodiment of this invention is a pharmaceutical composition comprising a FZD Agonist or a nucleic acid molecule, expression cassette, vector, a set of nucleic acid molecules or a set of vectors encoding a FZD Agonist described herein and a pharmaceutically acceptable carrier, diluent or excipient. The pharmaceutical composition may further comprise an additional agent, e.g., a second therapeutic antibody e.g. an anti-VEGF antibody (aflibercept, ranibizumab and bevacizumab), a growth factor, e.g., VEGF, or an agent that activates a Wnt pathway, e.g., the small molecule CHIR99021, a Norrin or R-Spondin, or a nucleic acid molecule, expression cassettes and vectors that encode the agent. The pharmaceutical composition may consist of or consist essentially of a FZD Agonist, or a nucleic acid molecule, an expression cassette or vector encoding an FZD Agonist described herein, and a pharmaceutically acceptable diluent, carrier or excipient. Suitable carriers, diluents and excipients, and their formulations are described in Remington: The Science and Practice of Pharmacy (19th ed.) ed. A. R. Gennaro, Mack Publishing Company, Easton, Pa. 1995. Typically, an appropriate amount of a pharmaceutically-acceptable salt is used in the formulation to render the formulation isotonic. Examples of the pharmaceutically-acceptable carrier include, but are not limited to, saline, Ringer's solution and dextrose solution. The pH of the solution may be e.g., from about 5 to about 8, from about 5 to 7.5 or from about 6 to 7. Further carriers include sustained release preparations such as semipermeable matrices of solid hydrophobic polymers containing the agonist, which matrices are in the form of shaped articles, e.g., films, liposomes or microparticles. It will be apparent to those persons skilled in the art that certain carriers may be more preferable depending upon, for instance, the route of administration and concentration of the FZD Agonists being administered.

[0116] This invention also includes methods for using the FZD Agonists, described herein. An embodiment of this invention is a method for activating a Wnt signaling pathway in a cell, comprising contacting a cell having an FZD receptor and a LRP5/6 co-receptor, with a tetravalent binding antibody molecule of this invention that binds the FZD, e.g., FZD4, and the LRP5/6 in an amount effective to activate Wnt signaling. It has been reported that the Norrin-FZD4 pathway plays a role in retinal angiogenesis (see Wang et al. Cell. 2012; 151(6):1332-1344; Braunger B M, Tamm E R. Adv Exp Med Biol. 2012; 723:679-683; Ohlmann A, Tamm E R. Prog Retin Eye Res. 2012; 31(3):243-257 and; Ye et al. Trends Mol Med. 2010; 16(9):417-425). Signaling through Norrin-FZD4 pathway is necessary for development and maintenance of retinal vasculature. Mutations affecting genes of this pathway may result in several vitreoretinopathies, such as Norrie Disease, Familial Exudative Vitreoretinopathy (FEVR), and Pseudoglioma and Osteoporosis Syndrome. Additionally, Retinopathy of Prematurity (ROP) has been associated with mutations in this Norrin-FZD4 pathway, and Wnt-pathway mutations have been reported in Coats Disease and Persistent Fetal Vasculature (PFV). FZD4 signaling activated by Norrin and/or WNT7A/B pathway is also associated with CNS blood brain barrier development and homeostasis. Genetic ablation of the Norrin, FZD4, LRP5, LRP6 and the co-receptor Tetraspanin-12 (Tspan-12) result in defective angiogenesis and barrier disruption in the retinal and/or cerebellar vessels (Cho et al. (2017) Neuron 95, 1056-1073; Zhou et al., (2014) J Clin Invest 124:3825-3846). Thus, a functional Wnt signaling system plays a key fundamental role in the development of a sufficient vascular and neural network in the eye and retina to support vision and in the CNS to support BBB development and homeostasis.

[0117] An aspect of this invention is a method for promoting and/or maintaining retinal vasculature by treating eye tissue, e.g., retinal tissue, with an effective amount of a pharmaceutical compositions comprising the tetravalent antibody molecules of this invention, e.g., tetravalent antibody molecules that binds FZD4 and LRP5/6, a FZD4 Agonists, having the structures illustrated in FIG. 6 through local or systemic administration. Also, an aspect of this invention is a method for promoting and/or maintaining BBB vasculature by treating a subject in need thereof with an effective amount of a pharmaceutical compositions of this invention, e.g., a composition comprising a FZD4 Agonists having the structures depicted in FIG. 6. The BBB is initiated during development and its integrity remains vital for homeostasis and neural protection throughout life. A subject in need thereof includes a subject having a neurological condition associated with BBB dysfunction, e.g., neurodegenerative diseases such as Alzheimer's disease, as well epilepsy, multiple sclerosis, and stroke.

[0118] A further aspect of this invention is a method for treating a subject having a disorder characterized by vascular leakage, particularly retinal vascular leakage, and/or endothelial cell leakage, and disorders characterized by reduced retinal or brain endothelial cell barrier functions or a compromised BBB or BRB, e.g., diabetic retinopathy, retinopathy of prematurity, Coat's disease, FEVR, Norrie disease, macular degeneration, diabetic macular edema, and pediatric vitreoretinopathies, by administering to such subject an effective amount of a pharmaceutical compositions of this invention, e.g., a composition comprising a FZD4 Agonist having the structures depicted in FIG. 6. An effective amount of such composition is an amount sufficient, e.g., to increase or restore endothelial cell barrier functions and thereby reducing vascular leakage in such subject. The subject may be a fetus.

[0119] The FZD4 Agonists of this invention particularly the FZD4 Agonist in the diabody-Fc-Fab format comprising two Fab fragments forming the FZD4 binding domain on the carboxy terminal of the Fc receptor and a binding domain for LRP5 and/or LRP6 composed of a diabody on the amino terminal of the Fc domain, e.g., as illustrated in FIG. 6, activates FZD4 and β-catenin signaling in endothelial cells, promotes barrier functions and thereby reduces endothelial cell permeability and significantly enhance angiogenesis. In particular, treatment of endothelial cells, in vivo, ex vivo or in vitro, with these FZD4 Agonists, preferably those with the diabody-Fc-Fab format, enhance the development and maintenance of retinal vasculature and/or the BRB and the BBB far more effectively than other molecules that do not have this structure.

[0120] A further aspect of the invention is a method for treating a subject having inflammation of all or part of the intestines, also known as inflammatory bowel disease, by administering to such subject an effective amount of a pharmaceutical composition of this invention, e.g., a composition comprising a FZD5 Agonist. Examples of inflammatory bowel disease include, but are not limited to, Crohn's disease, and ulcerative colitis. An effective amount of such composition is an amount sufficient to reduce, ameliorate, eliminate, or treat the inflammation. A subject in need thereof includes a subject having inflammation of the mucosal of the gastrointestinal tract. The methods disclosed herein may be practiced to reduce inflammation (e.g., inflammation associated with IBD or in a tissue affected by IBD, such as gastrointestinal tract tissue, e.g., small intestine, large intestine, or colon), activate WNT signaling, or reduce any of the histological symptoms of IBD (e.g., those disclosed herein).

[0121] The FZD Agonists of the present invention may be administered systemically or locally, e.g., by injection (e.g. subcutaneous, intravenous, intraperitoneal, intrathecal, intraocular, intravitreal, etc.), implantation, topically, or orally. Depending on the route of administration, the FZD Agonists may be coated in a material to protect the agonists from conditions that may inactivate the agonists. The tetravalent binding antibody molecules described herein may be dissolved or suspended in a pharmaceutically acceptable, preferably aqueous carrier. In addition, the composition comprising the FZD Agonists can contain excipients, such as buffers, binding agents, blasting agents, diluents, flavors, lubricants, etc. An extensive listing of excipients that can be used in such a composition, can be, for example, taken from A. Kibbe, Handbook of Pharmaceutical Excipients (Kibbe, 2000). The tetravalent binding antibody molecules can also be administered together with immune stimulating substances, such as cytokines.

[0122] An embodiment of this invention includes a method for deriving cerebral organoids with a vascular network exhibiting barrier functions by using the tetravalent antibody molecules described herein. The tetravalent binding antibody molecules described herein that activate FZD4 signaling are envisioned to promote barrier function within endothelial cells cultured with cerebral organoids and thereby promoting angiogenesis.

[0123] An embodiment of this invention includes a method for directed differentiation of multipotent or pluripotent stem cells (PSC) or induced pluripotent stem (iPS) cells comprising culturing the cells under conditions suitable for directed differentiation wherein said culturing conditions further comprise an effective amount of a tetravalent binding antibody molecule described herein. Studies in mouse and human PSCs have identified specific approaches to the addition of growth factors, including Wnt, which can induce PSC differentiation into different lineages. Methods for directed differentiation of PSCs comprising the activation of Wnt signaling are known in the art see e.g. Lam et al. (2014) Semin Nephol 34(4); 445-461; Yucer et al. (Sep. 6, 2017) Scientific Reports 7, Article number 10741. It is contemplated that the FZD Agonists, e.g. FZD4 Agonists, described herein can be used in an amount sufficient to effect activation of Wnt signaling pathways to direct differentiation of the PSCs to certain mesodermal lineages such as cardiomyocytes (cite Yoon et al. FZD4 Marks Lateral Plate Mesoderm and Signals with NORRIN to Increase Cardiomyocyte Induction from Pluripotent Stem Cell-Derived Cardiac Progenitors. Stem Cell Reports. 2018 January; 10(1):87-100. DOI: 10.1016/j.stemcr.2017.11.008.PMID: 29249665).

[0124] An embodiment of this invention is a method for enhancing tissue regeneration in a subject in need thereof by activating Wnt signaling in such subject by administering to the subject in need thereof an effective amount of a FZD Agonists described herein.

[0125] An embodiment of this invention includes a method for promoting endothelial cell barrier functions in eye tissue, e.g., retinal tissue, in a subject in need thereof, by administering an effective amount of a tetravalent binding molecule of this invention that binds FZD4 and LPR5/6, an FZD4 Agonist. In a particular embodiment the FZD4 Agonist of this invention that binds to FZD4 and a binding domain that binds to LRP5 or/and LRP6 has a diabody-Fc-Fab structure depicted in FIGS. 6 and 7. In an embodiment of this invention the FZD4 Agonists for enhancing retinal angiogenesis comprise the light chain CDRs, i.e., CDR-L1, CDR-L2, and CDR-L3 and heavy chain CDRs, i.e., CDR-H1, CDR-H2 and CDR-H3 of the FZD4-binding antibodies set forth in Tables 1, 2, and 6 and the LRP5/6-binding antibodies set forth in Tables 3, 4, and 6.

[0126] A subject as used herein may be any animal (e.g., a mammal), including, but not limited to, humans, non-human primates, horses, cows, dogs, cats, rodents, and the like. The subject may be a fetus. Typically, the subject is human.

[0127] Effective dosages and schedules for administering the FZD Agonists and nucleic acids that encode them described herein may be determined empirically, and making such determinations is within the skill in the art. Those skilled in the art will understand that the dosage of such FZD Agonists that must be administered will vary depending on, for example, the subject who will receive the antibody, the route of administration, the particular type of FZD Agonists used and other drugs being administered. Guidance in selecting appropriate doses for FZD Agonists is found in the literature on therapeutic uses of antibodies, e.g., Handbook of Monoclonal Antibodies, Ferrone, eds., Noges Publications, Park Ridge, N.J., (1985) ch. 22 and pp. 303-357; Smith, Antibodies in Human Diagnosis and Therapy, Haber, eds., Raven Press, New York (1977) pp. 365-389. The dosage ranges for the administration of the compositions are those large enough to produce the desired effect, e.g., promote endothelial cell barrier functions, vascular homeostasis, or enhance Wnt signaling. The dosage should not be so large as to cause adverse side effects, such as unwanted cross-reactions, anaphylactic reactions, and the like. Generally, the dosage will vary with the age, condition, gender and the extent of the disease or disorder, in the patient and can be determined by one of skill in the art. The dosage can be adjusted by the individual physician in the event of any contraindications. Dosage can vary, and can be administered in one or more dose administrations daily, for one or several days. While individual needs vary, determination of optimal ranges of effective amounts of the vector is within the skill of the art.

[0128] Also, an aspect of this invention is a method for making the tetravalent binding antibody molecules described herein. The amino acid sequences of FZD receptors, e.g. FZD4, and the Wnt co-receptors LRP5/6, and nucleotide sequences encoding FZD receptors and the Wnt co-receptors LRP5/6, as well as antibodies and libraries of antibodies that bind FZD, e.g., FZD4, or the Wnt co-receptors LRP5/6, are readily available or can be generated using methods well known in the art (see e.g., U.S. publication no. 2015/0232554, inventors Gurney et al. and US publication no. 2016/0194394, inventors Sidhu et al. and US 20190040144, inventors Pan et al.; U.S. publication no. 2017/0166636, inventors Wu et al.; U.S. publication no. 2016/0208018, inventors Chen et al.; U.S. publication no. 2016/0053022, inventors Macheda et al.; U.S. publication no. 2015/031293, inventors Damelin et al.). And a variety of methods are known in the art for generating and screening such phage display libraries for antibodies, and antibody fragments, scFv, Fab, VL, and VH possessing the desired binding characteristics. Such methods are reviewed, e.g., in Hoogenboom et al. in Methods in Molecular Biology 178:1-37 (O'Brien et al., ed., Human Press, Totowa, N.J., 2001) and further described, e.g., in the McCafferty et al., Nature 348:552-554; Clackson et al., Nature 352: 624-628 (1991); Marks et al., J. Mol. Biol. 222: 581-597 (1992); Marks and Bradbury, in Methods in Molecular Biology 248:161-175 (Lo, ed., Human Press, Totowa, N.J., 2003); Sidhu et al., J. Mol. Biol. 338(2): 299-310 (2004); Lee et al., J. Mol. Biol. 340(5): 1073-1093 (2004); Fellouse, Proc. Natl. Acad. Sci. USA 101(34): 12467-12472 (2004); and Lee et al., J. Immunol. Methods 284(1-2): 119-132(2004), all incorporated herein by reference. In certain phage display methods, repertoires of VH and VL genes are separately cloned by polymerase chain reaction (PCR) and recombined randomly in phage libraries, which can then be screened for antigen-binding phage as described in Winter et al., Ann. Rev. Immunol., 12: 433-455 (1994). Phage typically display antibody fragments, either as single-chain Fv (scFv) fragments or as Fab fragments. Libraries from immunized sources provide high-affinity antibodies to the immunogen without the requirement of constructing hybridomas.

[0129] Alternatively, the naive repertoire can be cloned (e.g., from human) to provide a single source of antibodies to a wide range of non-self and also self antigens without any immunization as described by Griffiths et al., EMBO J, 12: 725-734 (1993). Finally, naive libraries can also be made synthetically by cloning unrearranged V-gene segments from stem cells, and using PCR primers containing random sequence to encode the highly variable CDR3 regions and to accomplish rearrangement in vitro, as described by Hoogenboom and Winter, J. Mol. Biol., 227: 381-388 (1992). Patent publications describing human antibody phage libraries include, for example: U.S. Pat. No. 5,750,373, and US Patent Publication Nos. 2005/0079574, 2005/0119455, 2005/0266000, 2007/0117126, 2007/0160598, 2007/0237764, 2007/0292936, and 2009/0002360, all incorporated herein by reference. Antibodies or antibody fragments isolated from human antibody libraries are considered human antibodies or human antibody fragments herein.

[0130] In an embodiment of this invention a tetravalent binding antibody molecule in a diabody-Fc-scFv format comprising a LRP5/6 coreceptor binding domain comprising LRP5/6-binding diabody and an FZD-binding domain comprising two FZD-binding scFvs is generated by,

(a) selecting an Fc domain having a C-terminus and an N-terminus
(b) identifying an antibody that binds to an FZD receptor (the “FZD source antibody”), and
(c) identifying an antibody that binds LRP 5/6 co-receptor (“coreceptor source antibody” or “LRP 5/6 source antibody”),
(d) generating a nucleic acid molecule comprising a nucleotide sequence that encodes a polypeptide monomer comprising
[0131] (i) a peptide comprising a VL domain linked to a VH domain, the domains comprising the heavy chain and/or light chain CDRs of the antibody of step b that bind the FZD receptor, or comprising heavy chain and/or light chain CDRs derived from the antibody of step b that still bind the FZD, linked to
[0132] (ii) an Fc domain of step a, linked to
[0133] (iii) a peptide comprising VL domain linked to a VH domain comprising the light chain and/or heavy chain CDRs of the antibody of step c, or comprising CDRs derived from the antibody of step c and that still bind LRP 5/6 co-receptor,
   (e) expressing the nucleic acid molecule of step d to produce the polypeptide monomer and then dimerizing the polypeptide,
   wherein the VH and VL that bind the FZD of each monomer form a scFv that binds FZD, and the VH and VL domains that bind the LRP 5/6 coreceptor of one monomer bind the VL and VH that binds the Wnt coreceptor of another monomer forming a LRP5/6 co-receptor-binding diabody, and
   wherein the polypeptide monomer dimerizes via the Fc regions to form a tetravalent binding antibody molecule comprising an Fc domain, a FZD-binding domain comprised of two FZD-binding scFvs, and a LRP5/6 coreceptor binding domain comprised of the diabody,
   wherein the FZD binding domain and the LRP5/6 co-receptor binding domain are on opposite termini of Fc domain. It is contemplated that the peptides comprising the VL and VH domains that bind the FZD or the LRP may be linked to either the N or C terminus of the Fc domain via the VL domain or the VH domain provided the FZD binding domain and LRP binding domain are on opposite termini of the Fc domain. The FZD may be one or more of FZD1, FZD2, FZDS, FZD4, FZDS, FZD6, FZD7, FZDS, FZDS, and FZD10.

[0134] In an embodiment of this invention, the tetravalent binding antibody molecule has two FZD-binding Fabs, e.g., FZD4-binding Fabs, linked to one terminus of the Fc domain and two LRP5/6-binding scFvs or a LRP5/6-binding diabody linked to the other terminus of the Fc domain and is generated by,

(a) identifying the light chain complementary determining regions (CDR-L1, CDR-L2, and CDR-L3) and/or heavy chains complementary determining regions (CDR-H1, CDR-H2, and CDR-H3) of an antibody that binds to the FZD, e.g., FZD4 or FZDS, (the “FZD source antibody”) and
(b) identifying the CDR-L1, CDR-L2, and CDR-L3 and/or the CDR-H1, CDR-H2, and CDR-H3 of one or more antibodies that binds to LRP5 or LRP6, (the “LRP5/6 source antibody”),
(c) generating a nucleic acid molecule encoding a “heavy chain” polypeptide comprising
[0135] (i) a peptide comprising an immunoglobulin constant heavy chain region 1 (CH1 domain) linked to a VH domain comprising the CDR-H1, H2 and H3 of the antibody of step a), or a CDR-H1, CDR-H2 and CDR-H3 derived from the antibody of step a) that still binds the FZD4, linked to
[0136] (ii) an Fc region, linked to
[0137] (iii) a peptide comprising a VL domain comprising the CDR-L1, CDR-L2 and CDR-L3 of an antibody of step b) linked to a VH domain comprising the CDR-H1, CDR-H2 and CDR-H3 of an antibody of step b), or CDR-H1, CDR-H2 and CDR-H3 derived from the antibody of step b) that binds to LRP5 or LRP6,
   (d) generating a nucleic acid molecule comprising a nucleic acid sequence that encodes a “light chain” polypeptide comprising an immunoglobulin constant light region 1 (CL1) linked to a VL domain wherein the VL domain comprises the FZD light chain CDR-L1, CDR-L2 and CDR-L3 of the antibody in step a),
   (e) expressing the nucleic acid molecules of (c) and (d) to produce the heavy chain polypeptide and the light chain polypeptide,
   wherein two heavy chain polypeptides dimerize via their Fc regions and the VH that binds the FZD and CH1 domains of the heavy chain polypeptide pair with the VL that binds the FZD and CL1 domains of the light chain polypeptide forming two FZD Fabs and
   wherein the VH and VL that binds LRP5/6 in each heavy chain polypeptide pair to form an scFv that binds LRP5/6, or the VH and VL that bind LRP5/6 of one heavy chain polypeptide in the dimer pair with the VL and VH that bind the LRP5/6 of the other heavy chain polypeptide in the dimer to form a diabody, thereby forming the tetravalent binding antibody molecule comprising an Fc domain, two FZD Fabs linked to either the N or C terminus of the Fc domain and two LRP5/6-binding scFvs or a LRP5/6-binding diabody linked to the other terminus of the Fc domain.

[0138] The FZD source antibody may be an antibody that binds specifically to one FZD, e.g., FZD4, or is a pan-specific antibody binding FZD, e.g., FZD4 or FZD5, and one or more other FZD receptors and antagonizes Wnt signaling or inhibits Wnt binding to the receptor.

[0139] Alternatively, the FZD source antibody may be an antibody that binds specifically to one FZD, e.g., FZD4 or FZD5, or is a pan-specific antibody binding one FZD, e.g., FZD4 or FZD5, and one or more other FZD receptors without antagonizing Wnt signaling or inhibiting Wnt binding to the receptor. The LRP source antibody may be an antibody that binds specifically to LRP5/6, or is panspecific binding to LRP5/6 and to one or more of the Wnt co-receptors, and antagonizes Wnt signaling or inhibits Wnt binding to the co-receptor.

[0140] Alternatively, the LRP5/6 source antibody may be an antibody that binds to the LRP 5/6 co-receptor, or is panspecific binding to LRP5/6 and to one or more of the Wnt co-receptors, without antagonizing Wnt signaling or inhibiting Wnt binding to the LRP5/6 co-receptor.

[0141] The FZD source antibody may be an antibody fragment that binds the FZD receptor, e.g., an Fab, a VL or VH. The light chain and heavy chain CDRs, the VH and/or VL in the FZD binding domain of the FZD Agonists may be identical to the CDRs, the VH and/or VL of the FZD source antibody or may be at least 50%, at least 55%, at least 60%, at least 75%, at least 80%, at least 85%, at least 90%, at least 95%, at least 96%, at least 97%, at least 98% or at least 99% identical to the CDRs, VH or VL of the source antibody and still retain binding to the FZD receptor. The CDRs, the VH and/or VL in the FZD binding domain of the FZD Agonists may be identical to the CDRs, the VH and/or VL of a FZD4-binding or FZD5-binding antibody of Table 1, Table 2 or Table 6, or may be at least 50%, at least 55%, at least 60%, 75%, at least 80%, at least 85%, at least 90%, at least 95%, at least 96%, at least 97%, at least 98% or at least 99% identical to the CDRs, VH or VL of a FZD4-binding or FZD5-binding antibody of Table 1 or Table 2 or Table 6 and still retain binding to the FZD receptor.

[0142] Likewise, the Wnt co-receptor source antibody may be an antibody fragment, e.g. an Fab, a VL or a VH, that binds the LRP co-receptor, e.g., LRP5/6. The light chain CDRs and heavy chain CDRs, the VH and/or VL in the Wnt co-receptor binding domain of the FZD4 Agonists may be identical to the CDRs, the VH and/or VL of the Wnt co-receptor source antibody or may be at least at least 50%, at least 55%, at least 60%, at least 75%, at least 80%, at least 85%, at least 90%, at least 95%, at least 96%, at least 97%, at least 98% or at least 99% identical to the CDRs, VHs or VLs of the source antibody and still retain binding to the LRP co-receptor. The light chain CDRs and heavy chain CDRs, the VH and/or VL in the LRP5/6 binding domain of the FZD Agonists may be identical to the light chain CDRs and heavy chain CDRs, the VH and/or VL of a LRP-binding antibody of Table 3, Table 4 or Table 6 or may be at least at least 50%, at least 55%, at least 60%, at least 75%, at least 80%, at least 85%, at least 90%, at least 95%, at least 96%, at least 97%, at least 98% or at least 99% identical to the light chain CDRs and heavy chain CDRs, VH or VL of a LRP-binding antibody of Table 3, Table 4 or Table 6 and still retain binding to the LRP co-receptor. In an embodiment of this invention, two polypeptides of the tetravalent binding antibody molecule dimerize via knob-in-hole configuration of their Fc sequences. The tetravalent binding antibody molecules of this invention may be generated by dimerizing two polypeptides in a “knob-in-hole” configuration. The knob-in-hole configuration increases the modularity of this invention by facilitating the association of peptides that comprise binding moieties that bind different epitopes on a FZD receptor or LRP5/6 co-receptor or to epitopes on different members of the FZD receptor or co-receptor family, see e.g., FIG. 6. Methods for engineering Fc molecules via the knobs into holes design are well known in the art, see e.g., WO2018/026942, inventors Van Dyk et al., Carter P. (2001) J. Immunol. Methods 248, 7-15; Ridgway et al. (1996) Protein Eng. 9, 617-621; Merchant, et al. (1998) Nat. Biotechnol. 16, 677-681, and; Atwell et al., (1997) J. Mol. Biol. 270, 26-35.

[0143] Without wishing to be bound by theory, it is contemplated that the tetravalent binding antibody molecules of this invention facilitate the interaction of a FZD receptor and an LRP5/6 co-receptor on a cell by promoting their proximity and stabilizing conformations of the receptor proteins that are favorable for activating Wnt signaling pathways. Another embodiment of this invention is a method for facilitating the interaction of a FZD receptor and an LRP5/6 co-receptor on a cell thereby activating a Wnt signaling pathway in the cell comprising, a) selecting an Fc domain, or fragment thereof comprising a CH3 domain, having a C-terminus and an N-terminus b) linking a first bivalent binding domain, which binds the FZD receptor, on one terminus of the Fc domain and linking a second bivalent binding domain, which binds to the Wnt co-receptor, on the other terminus of the Fc domain thereby forming a tetravalent binding antibody molecule; c) contacting said tetravalent binding antibody molecule with the cell expressing said FZD receptor and Wnt co-receptor under conditions wherein the FZD receptor and co-receptor both bind to the tetravalent binding antibody molecule thereby activating the Wnt signaling pathway. The Wnt co-receptor binding domain and FZD binding domain are bivalent and each comprise a VL and/or a VH, or V_{H}H domain and one or both of the binding domains may be monospecific. In an embodiment of the invention one or both the Wnt co-receptor binding domain and FZD binding domain are bispecific. In an embodiment of the invention the Wnt co-receptor binding domain is bivalent and bispecific. The FZD binding domain may comprise a scFv that binds FZD, a V_{H}H that binds FZD, or an Fab that binds FZD, or combinations thereof, or a diabody that binds FZD. The Wnt co-receptor binding domain may comprise a scFv that binds the LRP5/6 co-receptor, a V_{H}H that binds LRP5/6, an Fab that binds the LRP5/6 co-receptor, or combinations thereof, or a diabody that binds the LRP5/6 co-receptor. In an embodiment of the invention the FZD binding domain comprises two FZD-binding Fabs and the Wnt co-receptor binding domain comprises a bispecific bivalent diabody that binds LRP5/6 on two different epitopes.

[0144] The tetravalent binding antibody molecules of this invention initiate the Wnt signaling pathway(s) that are stimulated by the FZD-co-receptor complexes, e.g., the β-catenin pathway stimulated by FZD-LRP5/6 complexes. Wnt ligands function by promoting the clustering of FZD receptors with co-receptors. Without wishing to be bound by theory, it is contemplated that the FZD Agonists described herein bind both the FZD receptor and its LRP5/6 co-receptor thereby forming a complex that mimics the binding of a Wnt molecule to the FZD receptor and LRP 5/6 co-receptor(s), which in turn activates Wnt signaling pathways, the Wnt β-catenin pathway.

[0145] An embodiment of this invention is a method for activating a Wnt signaling pathway comprising contacting a cell expressing a FZD receptor and its LRP5/6 co-receptor with an effective amount of the FZD Agonists of this invention comprising a FZD binding domain and a LRP5/6 co-receptor binding domain.

[0146] The FZD Agonists of this invention may be made recombinantly, e.g., by Gibson assembly (see Gibson et al. (2009) Nature Methods 6 (5): 343-345 and Gibson DG. (2011) Methods in Enzymology 498: 349-361), or the molecules may be made synthetically e.g., using commercial synthetic apparatuses, for example, automated synthesizers by Applied Biosystems, Inc., Beckman, etc. By using synthesizers, naturally occurring amino acids may be substituted with unnatural amino acids. The particular sequence and the manner of preparation will be determined by convenience, economics, purity required, and the like. If desired, various groups may be introduced into the peptide during synthesis or during expression, which allow for linking to other molecules or to a surface.

[0147] The binding domains of the FZD Agonists may be linked to the Fc domain via a linker. In some embodiments, adjacent VH and VL domains may be attached to each other via a peptide linker. In some embodiments adjacent constant domains and variable domains are attached via a peptide linker. The linker may be, e.g. a polypeptide linker, or a non-peptidic linker. In some embodiments the constant domains and variable domains of the FZD Agonists are attached to the Fc domain via a peptide linker. Suitable linkers are well known in the art, e.g., an XTEN linker (see WO2013120683, inventors Schellenberger et al.) In some embodiments, the peptide linker comprises at least 1, 2, 3, 4, 5, 6, 7, 8, 9, 10, 11, 12, 13, 14, 15, 16, 17, 18, 19, 20, 21, 22, 23, 24, 25, 26, 27, 28, 29, 30, 31, 32, 33, 34, 35, 36, 37, 38, 39, 40, 41, 42, 43, 44, 45, 46, 47, 48, 49, 50, 51, 52, 53, 54, 55, 56, 57, 58, 59, 60, 61, 62, 63, 64, 65, 66, 67, 68, 69, 70, 71, 72, 73, 74, 75, 76, 77, 78, 79, 80, 81, 82, 83, 84, 85, 86, 87, 88, 89, 90, 91, 92, 93, 94, 95, 96, 97, 98, 99 or at least 100 amino acids. In some embodiments, the peptide linker is between 1 to 100, 5 to 75, 1 to 50, 5 to 50, 1 to 30, 1 to 25, 5 to 25, 5 to 20, 5 to 15, 5 to 10, 1-10 or 1-5 amino acids in length. The modular aspects of this invention allow for mixing and matching of binding domains derived from antibodies that bind to FZD receptor or antibodies that bind LRP5/6 co-receptor on the opposite termini of the Fc domain to generate a tetravalent binding antibody molecule that can engage FZD receptor—LRP5/6 co-receptor complexes to activate Wnt signaling.

[0148] The Fc domain of the FZD Agonists, with or without the linker, is of a length and flexibility that allows for the tetravalent binding antibody molecule of this invention to bind both the FZD receptor and its LRP5/6 co-receptor thereby stabilizing receptor conformations that are compatible with activation of downstream Wnt signaling pathways. In an embodiment of this invention the Fc domain, or fragment thereof comprising the CH3 domain, with or without the linker is greater than 100 amino acids spanning up to 300 Å, greater than 125 amino acids spanning up to 375 Å, greater than 150 amino acids spanning up to 450 Å, greater than 175 amino acids spanning up to 525 Å, or greater than 300 amino acids spanning up to 900 Å. Preferably the Fc domain is about 200 amino acids to about 300 amino acids in length. As used herein and in the appended claims, the singular forms “a”, “an”, and “the” include plural referents unless the context clearly dictates otherwise. Thus, for example, reference to “a cell” includes a plurality of such cells and reference to “the peptide” includes reference to one or more peptides and equivalents thereof, e.g. polypeptides, known to those skilled in the art, and so forth.

[0149] An “affinity matured” antibody or “maturation of an antibody” refers to an antibody with one or more alterations in one or more hypervariable regions (HVRs), compared to a parent or source antibody which does not possess such alterations, such alterations resulting in an improvement in the affinity of the antibody for antigen or to other desired properties of the molecule.

[0150] By “comprising” it is meant that the recited elements are required in the composition/method/kit, but other elements may be included to form the composition/method/kit etc. within the scope of the claim. For example, a composition comprising tetravalent binding antibody molecules is a composition that may comprise other elements in addition to the tetravalent binding antibody molecules, e.g. functional moieties such as polypeptides, small molecules, or nucleic acids bound, e.g. covalently bound, to the tetravalent binding antibody molecules; agents that promote the stability of the tetravalent binding antibody molecule composition, agents that promote the solubility of the tetravalent binding antibody molecule composition, adjuvants, etc. as will be readily understood in the art, with the exception of elements that are encompassed by any negative provisos.

[0151] By “consisting essentially of”, it is meant a limitation of the scope of composition or method described to the specified materials or steps that do not materially affect the basic and novel characteristic(s) of the subject invention. For example, a tetravalent binding antibody molecule “consisting essentially of” a disclosed sequence has the amino acid sequence of the disclosed sequence plus or minus about 5 amino acid residues at the boundaries of the sequence based upon the sequence from which it was derived, e.g. about 5 residues, 4 residues, 3 residues, 2 residues or about 1 residue less than the recited bounding amino acid residue, or about 1 residue, 2 residues, 3 residues, 4 residues, or 5 residues more than the recited bounding amino acid residue.

[0152] By “consisting of”, it is meant the exclusion from the composition, method, or kit of any element, step, or ingredient not specified in the claim. For example, a tetravalent binding antibody molecule “consisting of” a disclosed sequence consists only of the disclosed amino acid sequence.

[0153] Where a range of values is provided, it is understood that each intervening value, to the tenth of the unit of the lower limit unless the context clearly dictates otherwise, between the upper and lower limits of that range is also specifically disclosed. Each smaller range between any stated value or intervening value in a stated range and any other stated or intervening value in that stated range is encompassed within the invention. The upper and lower limits of these smaller ranges may independently be included or excluded in the range, and each range where either, neither or both limits are included in the smaller ranges is also encompassed within the invention, subject to any specifically excluded limit in the stated range. Where the stated range includes one or both of the limits, ranges excluding either or both of those included limits are also included in the invention.

[0154] The basic antibody structural unit is known to comprise a tetramer. Each tetramer is composed of two identical pairs of polypeptide chains, each pair having one “light” (about 25 kDa) and one “heavy” chain (about 50-70 kDa). The amino-terminal portion of each chain includes a variable region of about 100 to 110 or more amino acids primarily responsible for antigen recognition. The carboxy-terminal portion of each chain defines a constant region primarily responsible for effector functions, e.g., binding Fc receptors and activation of antibody-dependent cellular cytotoxicity (ADCC) and complement dependent cytotoxicity (CDC). Methods for dimerizing peptides via a knob-in-hole configuration are described in WO2018/026942, inventors Van Dyk et al., Carter P. (2001) J. Immunol. Methods 248, 7-15; Ridgway et al. (1996) Protein Eng. 9, 617-621; Merchant, et al. (1998) Nat. Biotechnol. 16, 677-681, and; Atwell et al., (1997) J. Mol. Biol. 270, 26-35. The Fc regions may be Merrimack (knob chain: Q347M, Y349F, T350D, T366W and L368M; hole chain: S354I, E357L, T366S, L368A and Y407V), Merchant (knob chain: T366W; hole chain: T336S, L368A and Y407V) or Merchant S:S (Merchant mutations with additional S354C variant in the knob chain and Y349C in the hole chain). The Fc regions may also contain mutations that alter their effector function, e.g., the Fc region may have attenuated effector functions due to amino acid mutations, e.g., DANG variants and LALAPS variants. Methods are well known in the art for mitigating antibody effector function, including for example amino acid substitutions in the Fc regions, e.g., the N297G and D265A, N297G (DANG) variants, L234A, L235A, P331S (LALAPS), LALAPS Merchant, LALAPS Merchant S-S (Merchant A. M. et al Nature Biotechnol 1998 vol 16 p 677-681) variants, or L234A, L235A, P329G (LALA-PG) substitutions, see e.g., Lo et al. “Effector Attenuating Substitutions that Maintain Antibody Stability and Reduce Toxicity in Mice. The Journal of Biological Chemistry Vol. 292, No. 9, pp. 3900-3908, Mar. 3, 2017, incorporated herein by reference. In general, antibody molecules obtained from humans relate to any of the classes IgG, IgM, IgA, IgE and IgD, which differ from one another by the nature of the heavy chain present in the molecule. Certain classes have subclasses as well, such as IgG₁, IgG₂, and others. Furthermore, in humans, the light chain may be a kappa chain or a lambda chain.

[0155] Three highly divergent stretches within each of the heavy chain variable domain, VH or VH domain, and light chain variable domain, VL or VL domain, referred to as complementarity determining regions (CDRs), are interposed between more conserved flanking stretches known as “framework regions”, or “FRs”. Thus, the term “FR” refers to amino acid sequences which are naturally found between, and adjacent to, CDRs in immunoglobulins. A VH domain typically has four FRs, referred to herein as VH framework region 1 (FR1), VH framework region 2 (FR2), VH framework region 3 (FR3), and VH framework region 4 (FR4). Similarly, a VL domain typically has four FRs, referred to herein as VL framework region 1 (FR1), VL framework region 2 (FR2), VL framework region 3 (FR3), and VL framework region 4 (FR4). In an antibody molecule, the three CDRs of a VL domain (CDR-L1, CDR-L2 and CDR-L3) and the three CDRs of a VH domain (CDR-H1, CDR-H2 and CDR-H3) are disposed relative to each other in three-dimensional space to form an antigen-binding site within the antibody variable region. The surface of the antigen-binding site is complementary to a three-dimensional surface of a bound antigen. The amino acid sequences of VL and VH domains may be numbered, and CDRs and FRs therein identified/defined, according to the Kabat numbering system (Kabat et al., 1991, Sequences of Proteins of Immunological Interest, 5th Ed. Public Health Service, National Institutes of Health, Bethesda, Md.) or the INTERNATIONAL IMMUNOGENETICS INFORMATION SYSTEM (IMGT numbering system; Lefranc et al., 2003, Development and Comparative Immunology 27:55-77), both incorporated herein by reference. One of ordinary skill in the art would possess the knowledge for numbering amino acid residues of a VL domain and of a VH domain, and identifying CDRs and FRs therein, according to a routinely employed numbering system such as the IMGT numbering system, the Kabat numbering system, and the like.

[0156] The term “antibody” as referred to herein includes whole antibodies and any antigen binding fragment (i.e., “antigen-binding portion”) or single chain thereof. A “whole antibody” or full-length refers to a glycoprotein comprising at least two heavy (H) chains and two light (L) chains inter-connected by disulfide bonds, or an antigen binding portion thereof. Each heavy chain is comprised of a heavy chain variable region or domain (abbreviated herein as VH) and a heavy chain constant region. The heavy chain constant region is comprised of three domains, CH1, CH2 and CH3. Each light chain is comprised of a light chain variable region or domain (abbreviated herein as VL) and a light chain constant region. The light chain constant region is comprised of one domain, CL or CL1. The VH and VL regions can be further subdivided into regions of hypervariability, termed complementarity determining regions (CDR), interspersed with regions that are more conserved, termed framework regions (FR). Each VH and VL is composed of three CDRs and four FRs, arranged from amino-terminus to carboxy-terminus in the following order: FR1, CDR1, FR2, CDR2, FR3, CDR3, FR4. The variable regions of the heavy and light chains contain a binding domain that interacts with an antigen. The constant regions of the antibodies may mediate the binding of the immunoglobulin to host tissues or factors, including various cells of the immune system (e.g., effector cells) and the first component (C1q) of the classical complement system. The term “antigen-binding portion” or “antigen-binding fragment” of an antibody (or simply “antibody portion” or “antibody fragment”), as used herein, refers to one or more fragments, portions or domains of an antibody that retain the ability to specifically bind to an antigen. It has been shown that fragments of a full-length antibody can perform the antigen-binding function of an antibody. Examples of binding fragments encompassed within the term “antigen-binding portion” of an antibody include (i) an Fab fragment, a monovalent fragment consisting of the VL, VH, CL1 and CH1 domains; (ii) an F(ab′)2 fragment, a bivalent fragment comprising two F(ab)′ fragments linked by a disulfide bridge at the hinge region; (iii) an Fd fragment consisting of the VH and CH1 domains; (iv) an Fv fragment consisting of the VL and VH domains of a single arm of an antibody; (v) a dAb fragment (Ward et al. (1989) Nature 241:544-546), which consists of a VH domain; and (vi) an isolated complementary determining region (CDR). Furthermore, although the two domains of the Fv fragment, VL and VH, are coded for by separate genes, they can be joined, using recombinant methods, by a synthetic linker that enables them to be made as a single contiguous chain in which the VL and VH regions pair to form monovalent molecules (known as single chain Fv (scFv); see e.g., Bird et al. (1988) Science 242:423-426; and Huston et al. (1988) Proc. Natl. Acad. Sci. USA 85:5879-5883). Such single chain antibodies are also intended to be encompassed within the term “antigen-binding portion” of an antibody. Other forms of single chain antibodies, such as diabodies, are also encompassed (see e.g., Holliger et al. (1993) PNAS. USA 90:6444-6448).

[0157] “Diabodies,” or sometimes referred to herein as “Dia,” as used herein are dimeric antibody fragments. In each polypeptide of the diabody, a heavy-chain variable domain (VH) is linked to a light-chain variable domain (VL) but unlike single-chain Fv fragments, the linker between the VL and VH is too short for intramolecular pairing and as such each antigen-binding site is formed by pairing of the VH and VL of one polypeptide with the VH and VL of the other polypeptide. Diabodies thus have two antigen-binding sites, and can be monospecific or bispecific. (see, e.g., Holliger, P., et al. (1993) Proc. Natl. Acad. Sci. USA 90:6444-6448; Poljak, R. J., et al. (1994) Structure 2:1121-1123; Kontermann and Dubel eds., Antibody Engineering (2001) Springer-Verlag. New York. 790 pp. (ISBN 3-540-41354-5) incorporated herein by reference.

[0158] As used herein an “effective amount” of an agent, e.g., the tetravalent binding antibody molecules or a pharmaceutical composition comprising the molecules, refers to an amount effective, at dosages and for periods of time necessary, to achieve the desired result. In some embodiments, a therapeutically effective amount is one that reduces the incidence and/or severity of, stabilizes one or more characteristics of, and/or delays onset of, one or more symptoms of the disease, disorder, and/or condition. In some embodiments, the amount of a FZD Agonists administered to the subject is in the range of about 0.001 mg/kg to 10 mg/kg, 0.5 mg/kg to about 10 mg/kg, or about 0.5 mg/kg to about 1 mg/kg of the subject's body weight. For example, in some embodiments the FZD4 Agonist may be applied to the eye in an amount of, e.g., about 0.02-1.5 mg, about 0.05-1.0 mg, or about 0.1-0.5 mg per eye. As used herein, the term “epitope” includes any protein determinant capable of specific binding to an immunoglobulin or fragment thereof, or a T-cell receptor. The term “epitope” includes any protein determinant capable of specific binding to an immunoglobulin or T-cell receptor. Epitopic determinants usually consist of chemically active surface groupings of molecules such as amino acids or sugar side chains and usually have specific three-dimensional structural characteristics, as well as specific charge characteristics. An antibody is said to specifically bind an antigen when the dissociation constant is ≤10 μM; e.g., ≤100 nM, preferably ≤10 nM and more preferably ≤1 nM.

[0159] The constant region of immunoglobulin molecules is also called the fragment crystallizable region, the “Fc region” or “Fc domain.” The Fc domain is composed of two identical protein fragments, derived from the second and third constant domains of the antibody's two heavy chains and the Fc domains of IgGs bear a highly conserved N-glycosylation site. Glycosylation of the Fc fragment is essential for Fc receptor-mediated activity. In an embodiment of the invention the Fc domain of the tetravalent binding antibody molecule is engineered such that it does not target the cell that binds the tetravalent binding antibody molecule for ADCC or CDC-dependent death. In an embodiment of the invention the Fc domain of the tetravalent binding antibody molecule is a peptide dimer in a knob-in-hole configuration. The peptide dimer may be a heterodimer.

[0160] The terms “individual,” “subject,” “host,” and “patient,” are used interchangeably herein and refer to any mammalian subject for whom diagnosis, treatment, or therapy is desired, particularly humans.

[0161] “LRP”, “LRP proteins” and “LRP receptors” is used herein to refer to members of the low density lipoprotein receptor-related protein family. These receptors are single-pass transmembrane proteins that bind and internalize ligands in the process of receptor-mediated endocytosis. LRP proteins LRP5 (e.g., LRP5: NP_002326.2) and LRP6 (e.g., LRP6: NP_002327.2) are included in a Wnt receptor complex required for activation on the Wnt-Bcatenin signaling pathway. See also, for human/mouse LRP5 and LRP6: https://www.uniprot.org/uniprot/O075197, https://www.uniprot.org/uniprot/Q91VN0, https://www.uniprot.org/uniprot/O075581, https://www.uniprot.org/uniprot/088572.

[0162] The term “polypeptide fragment” as used herein refers to a polypeptide that has an amino terminal and/or carboxy-terminal deletion, but where the remaining amino acid sequence is identical to the corresponding positions in the naturally occurring sequence deduced, for example, from a full-length cDNA sequence.

[0163] As used herein the term “paratope” includes the antigen binding site in the variable region of an antibody that binds to an epitope.

[0164] “Single-chain Fv” or “scFv” antibody fragments comprise the VH and VL domains of an antibody, wherein these domains are present in a single polypeptide chain. Generally, the Fv polypeptide further comprises a polypeptide linker between the VH and VL domains which enables the scFv to form the desired structure for antigen binding. For a review of scFv and other antibody fragments, see James D. Marks, Antibody Engineering, Chapter 2, Oxford University Press (1995) (Carl K. Borrebaeck, Ed.).

[0165] “Single-domain antibody” (sdAb), or “nanobody”, is an antibody fragment consisting of a single monomeric variable antibody domain. “VHH” or “VHH fragment” as used herein refers to a human VH that has been engineered to be independent of the light chain (Nilvebrant et al. Curr Pharm Des. (2016) 22(43):6527-6537; Barthelemy et al., Journal of Biological Chemistry (2007) 283:3639-3654).

[0166] The terms “treatment”, “treating” and the like are used herein to generally mean obtaining a desired pharmacologic and/or physiologic effect. The effect may be prophylactic in terms of completely or partially preventing a disease or symptom thereof and/or may be therapeutic in terms of a partial or complete cure for a disease and/or adverse effect attributable to the disease. “Treatment” as used herein covers any treatment of a disease in a mammal, and includes: (a) preventing the disease from occurring in a subject which may be predisposed to the disease but has not yet been diagnosed as having it; (b) inhibiting the disease, i.e., slowing or arresting its development; or (c) relieving the disease, i.e., causing regression of the disease. The therapeutic agent may be administered before, during or after the onset of disease or injury. The treatment of ongoing disease, where the treatment stabilizes or reduces the undesirable clinical symptoms of the patient, is of particular interest. Such treatment is desirably performed prior to complete loss of function in the affected tissues. The subject therapy may be administered during the symptomatic stage of the disease, and in some cases after the symptomatic stage of the disease.

[0167] The ability of the tetravalent binding antibody molecules of this invention to activate Wnt signaling can be confirmed by a number of assays. The tetravalent binding antibody molecules of this invention typically initiate a reaction or activity that is similar to or the same as that initiated by the FZD receptor's natural ligand. The tetravalent binding antibody molecules of this invention activates the Wnt signaling pathways, e.g., the canonical Wnt-βcatenin signaling pathway. As used herein, the term “activates” refers to a measurable increase in the intracellular level of a Wnt signaling pathway, e.g., the Wnt-βcatenin signaling pathway, compared with the level in the absence of a FZD Agonist of the invention.

[0168] Various methods are known in the art for measuring the level of Wnt-βcatenin activation. These include but are not limited to assays that measure: Wnt-βcatenin target gene expression; LEF/TCF reporter gene expression (such as TopFLASH, superTopFLASH, pBAR); βcatenin stabilization; LRP5/6 phosphorylation; Dishevelled phosphorylation; Axin translocation from cytoplasm to cell membrane and binding to LRP5/6. The canonical Wnt-βcatenin signaling pathway ultimately leads to changes in gene expression through the transcription factors TCF1, TCF7L1, TCF7L2 and LEF1. The transcriptional response to Wnt activation has been characterized in a number of cells and tissues. As such, global transcriptional profiling by methods well known in the art can be used to assess Wnt-βcatenin signaling activation.

[0169] Changes in Wnt-responsive gene expression are generally mediated by TCF and LEF transcription factors. A TCF reporter assay assesses changes in the transcription of TCF/LEF controlled genes to determine the level of Wnt-βcatenin signaling. A TCF reporter assay was first described by Korinek, V. et al., 1997. Also known as TOP/FOP this method involves the use of three copies of the optimal TCF motif CCTTTGATC, or three copies of the mutant motif CCTTTGGCC, upstream of a minimal c-Fos promoter driving luciferase expression (pTOPFLASH and pFOPFLASH, respectively) to determine the transactivational activity of endogenous βcatenin/TCF. A higher ratio of these two reporter activities (TOP/FOP) indicates higher βcatenin/TCF activity. A newer and more sensitive version of this reporter is called pBAR and contains 12 repeats of the TCF motifs (Biechele and Moon, Methods Mol Biol. 2008; 468:99-110, PMID: 19099249).

[0170] General methods in molecular and cellular biochemistry can be found in such standard textbooks as Molecular Cloning: A Laboratory Manual, 3rd Ed. (Sambrook et al., CSH Laboratory Press 2001); Short Protocols in Molecular Biology, 4th Ed. (Ausubel et al. eds., John Wiley & Sons 1999); Protein Methods (Bollag et al., John Wiley & Sons 1996); Nonviral Vectors for Gene Therapy (Wagner et al. eds., Academic Press 1999); Viral Vectors (Kaplift & Loewy eds., Academic Press 1995); Immunology Methods Manual (I. Lefkovits ed., Academic Press 1997); and Cell and Tissue Culture: Laboratory Procedures in Biotechnology (Doyle & Griffiths, John Wiley & Sons 1998).

[0171] Unless otherwise defined, scientific and technical terms used in connection with the present invention shall have the meanings that are commonly understood by those of ordinary skill in the art. Further, unless otherwise required by context, singular terms shall include pluralities and plural terms shall include the singular. Generally, nomenclatures utilized in connection with, and techniques of, cell and tissue culture, molecular biology, and protein and oligo- or polynucleotide chemistry and hybridization described herein are those well-known and commonly used in the art. Standard techniques are used for recombinant DNA, oligonucleotide synthesis, and tissue culture and transformation (e.g., electroporation, lipofection). Enzymatic reactions and purification techniques are performed according to manufacturer's specifications or as commonly accomplished in the art or as described herein.

[0172] The foregoing techniques and procedures are generally performed according to conventional methods well known in the art and as described in various general and more specific references that are cited and discussed throughout the present specification. See e.g., Sambrook et al. Molecular Cloning: A Laboratory Manual (2d ed., Cold Spring Harbor Laboratory Press, Cold Spring Harbor, N.Y. (1989)). The nomenclatures utilized in connection with, and the laboratory procedures and techniques of, analytical chemistry, synthetic organic chemistry, and medicinal and pharmaceutical chemistry described herein are those well-known and commonly used in the art. Standard techniques are used for chemical syntheses, chemical analyses, pharmaceutical preparation, formulation, and delivery, and treatment of patients.

### EXAMPLES

### Example I Identification and Characterization of FZD4 Binding or FZD5 Binding Fab Phage

[0173] A. FZD4 Antibodies from Affinity Matured Libraries of FZD4-Binding Antibody 5027 and 5044; FZD5 Antibodies from Affinity Matured Libraries of FZD5-Binding Antibody 2919 and 2928.

[0174] Affinity matured libraries of known FZD4-binding antibodies 5027 and 5044 and known FZD5-binding antibodies 2919 and 2928 were prepared using routine methods, essentially as described in US publication no. 2016/0194394, inventors Sidhu et al., see also Persson et al. J. Mol. Biol., 2013 Feb. 22; 425(4):803-11 https://pubmed.ncbi.nlm.nih.gov/23219464/, both incorporated herein in their entirety by reference.

[0175] The 6 CDRs of the heavy chain (CDR-H1, CDR-H2 and CDR-H3) and light chains (CDR-L1, CDR-L2 and CDR-L3) of antibodies 5044, 5027, 2919, and 2928 antibodies isolated from the affinity matured libraries are set forth in Table 1 and Table 2.

[0176] Single point ELISAs were performed on 96-well Maxisorp plates coated with the extracellular domains (ECDs) of human FZD4 protein in the presence or absence of a saturating concentration of 5027 diabody-Fc (a diabody comprising the VL and VH of 5027 linked to an Fc domain). The plates were incubated with monoclonal Fab-phage followed by incubation with horseradish peroxidase (HRP)-conjugated anti-M13 antibody. Wells were subsequently washed 8 times followed by incubations with 3,3,′5,5′-tetramethylbenidine/H₂O₂ peroxidase (TMB) substrate for 5-10 min. The reaction was stopped by adding 1M H₃PO₄ and the absorbance was measured spectrophotometrically at 450 nm in a microtiter plate reader. The results of the assay are depicted in FIG. 1 and FIG. 2 and demonstrate that the newly identified FZD4 antibodies bind FZD4 at a site overlapping with the site recognized by antibody 5027. FZD4 binding antibodies 5027 and 5044 are described in U.S. provisional application No. 62/885,781, incorporated herein by reference.

[0177] B. Epitope Mapping of Lead FZD4 Antibodies.

[0178] ELISA assays were performed in 384-well Maxisorp plates coated with FZD4 ECD wild-type (FZD4) or mutant FZD4 proteins (FZD_swap1-18) that replace segments of the FZD4 ECD with corresponding regions from FZDS. The plates were incubated with 10 nM IgG known to bind specifically to FZD4, i.e., 5044 and 5027, or to be panspecific, i.e., 5016 (binds FZD4, FZDS, and other FZD receptors), followed by incubation with horseradish peroxidase (HRP)-conjugated anti-Kappa light chain antibody. Phosphate buffered saline (PBS) and IgG 4275 which does not bind FZD4 or FZDS were used as controls. The wells were washed 6 times followed by incubations with 3,3,′5,5′-tetramethylbenidine/H₂O₂ peroxidase (TMB) substrate for 3-5 min. The reaction was stopped by adding 1M H₃PO₄ and the absorbance was measured spectrophotometrically at 450 nm in a microtiter plate reader, see FIG. 2. The pan-FZD binder 5016 is a positive control showing that the antigens are functional, with the exception of “FZD4_Swap10”. Both FZD4-specific antibodies 5027 and 5044 are unable to bind to “FZD4 Swap 7”, suggesting that these molecules bind to this region of the FZD ECD.

[0179] C. Characterization of FZD4 IgG.

[0180] FZD4-binding full length IgGs were expressed via transient transfection in an Expi293 cell culture system, essentially as described in Tao et al., Tailored tetravalent antibodies potently and specifically activate Wnt/Frizzled pathways in cells, organoids and mice. Elife. 2019 Aug. 27; 8:e46134. doi: 10.7554/eLife.46134; PMID: 31452509. and purified via Protein A affinity chromatography. Briefly, cells were grown to a density of approximately 2.5×10⁶ cells/ml in Expi293 Expression Media (Gibco) in baffled cell culture flasks and transfected with the appropriate vectors using FectoPRO transfection reagent (Polyplus-transfection) using standard manufacture protocols (ThermoFisher). Expression was allowed to proceed for 5 days at 37° C. and 8% CO₂ with shaking at 125 rpm. After expression, cells were removed by centrifugation and protein was purified from the conditioned media using Protein A Sepharose (GE Healthcare). Purified protein was buffer exchanged into either PBS or a formulated stabilization buffer (36.8 mM citric acid, 63.2 mM Na₂HPO₄, 10% trehalose, 0.2 M L-arginine, 0.01% Tween-80, pH 6.0) for storage. Proteins concentrations were determined by absorbance at 280 nm and purity was confirmed by SDS-PAGE analysis. Expression titers were determined as mg of purified protein per liter of mammalian cell culture. Size exclusion chromatography (SEC) results in Table A below are defined as “−”: evidence of multiple peaks on SEC trace, <50% monomeric species; “+”: >50% monomeric species, delayed retention time (>14 min.); “++”: >90% of major peak at/near expected retention time for a monomeric IgG. Standard retention time was determined by comparison to Trastuzumab.

TABLE A

| | Expression Titer | SEC |
|---|---|---|
| TRAC ID | (mg/l) | Result |
| 13980 | 58 | − |
| 13981 | 40 | − |
| 13982 | 43 | − |
| 13983 | 65 | ++ |
| 13984 | 52 | − |
| 13985 | 61 | ++ |
| 13956 | 47 | + |
| 13957 | 52 | + |
| 13958 | 58 | − |
| 13959 | 46 | + |
| 13962 | 38 | − |
| 13963 | 56 | − |
| 13964 | 47 | − |
| 13965 | 74 | ++ |
| 13966 | 86 | − |
| 13967 | 87 | − |
| 13968 | 89 | + |
| 13969 | 72 | − |
| 13970 | 36 | − |
| 13971 | 46 | ++ |
| 13972 | 27 | + |
| 13973 | 41 | + |
| 13974 | 41 | + |
| 13975 | 41 | ++ |
| 13979 | 49 | − |

[0181] Trac ID corresponds to the antibody number in Table 1 and Table 2.

[0182] D. Size-Exclusion Chromatography Analysis and ELISA Specificity Measurements of the FZD4 IgGs.

[0183] Twenty micrograms of the FZD4 binding IgGs were separated over an AdvanceBio SEC, 300 Å, 2.7 μm, 4.6×300 mm column in a mobile phase of PBS using an Agilent Bio-Inert HPLC. Protein elution was monitored using absorbance at 280 nM. The results are presented in FIG. 3A.

[0184] ELISA specificity measurements of the FZD4 antibodies were determined against FZD1 and FZD10, the two FZD family member most closely related to FZD4. ELISA assays were performed in 384-well Maxisorp plates coated with FZD ECD wild-type or mutant proteins at a concentration of 1 μg/ml and excess binding sites were blocked with 0.5% BSA. The plates were incubated with 10 nM of the FZD4 binding IgGs followed by incubation with horseradish peroxidase (HRP)-conjugated anti-Kappa light chain antibody. The wells were washed 6 times followed by incubations with 3,3,′5,5′-tetramethylbenidine/H₂O₂ peroxidase (TMB) substrate for 3-5 min. The reaction was stopped by adding 1M H₃PO₄ and the absorbance was measured spectrophotometrically at 450 nm in a microtiter plate reader. The results are presented in FIG. 3B.

[0185] E. Identification of the CDRs of the FZD4 or FZD5 binding antibodies.

[0186] The amino acid sequences of the CDRs of the FZD4-binding and FZD5-binding immunoglobulins are set forth in Tables 1 and 2. The CDRs were identified according to the INTERNATIONAL IMMUNOGENETICS INFORMATION SYSTEM (IMGT numbering system; Lefranc et al., 2003, Development and Comparative Immunology 27:55-77), and annotated as described in Persson et al. J Mol Biol. 2013 Feb. 22; 425(4):803-11, both incorporated herein by reference.

TABLE 1

| | | FZD4 binding antibodies CDRs | | | | | | | | | | | |
|---|---|---|---|---|---|---|---|---|---|---|---|---|---|
| | | | SEQ | | SEQ | | SEQ | | SEQ | | SEQ | | SEQ |
| Antibody | | | ID | | ID | | ID | | ID | | ID | | ID |
| ID | Library | L1 | NO: | L2 | NO: | L3 | NO: | H1 | NO: | H2 | NO: | H3 | NO: |
| 5044 | F | SVSSA | 1 | SASSLYS | 2 | WYYAPI | 3 | LSSYSM | 24 | YISSYYGYTY | 51 | PAPGHWGF | 79 |
| 13953 | 5044AM | SVSSA | 1 | SASSLYS | 2 | GNYGPI | 4 | IAFYSI | 25 | YISPFSGITH | 52 | PAVGHLAM | 80 |
| 13954 | 5044AM | SVSSA | 1 | SASSLYS | 2 | GYYAPI | 5 | IYSYSI | 26 | YISSYYGYTY | 51 | STVGHGGM | 81 |
| 13955 | 5044AM | SVSSA | 1 | SASSLYS | 2 | WYYAPI | 3 | ISSYSI | 27 | YISPYYSYTY | 53 | PAPAHWGF | 82 |
| 13956 | 5044AM | SVSSA | 1 | SASSLYS | 2 | GYYALI | 6 | LSSYSM | 24 | YISSYAGYTS | 54 | PALGHAGM | 83 |
| 13957 | 5044AM | SVSSA | 1 | SASSLYS | 2 | WYFAPI | 7 | ISAYSI | 28 | YISPYFGLTG | 55 | PAPGHWGM | 84 |
| 13958 | 5044AM | SVSSA | 1 | SASSLYS | 2 | WYYAPI | 3 | LSSYSI | 29 | YISSYYGYTY | 51 | PVAGHGGM | 85 |
| 13959 | 5044AM | SVSSA | 1 | SASSLYS | 2 | GYNAPI | 8 | LYSYSM | 30 | FISSFYGYTD | 56 | PAVGHLAL | 86 |
| 13960 | 5044AM | SVSSA | 1 | SASSLYS | 2 | WYYAPI | 3 | LTSYSM | 31 | YISSYYGSTY | 57 | PAPGHWGM | 84 |
| 13961 | 5044AM | SVSSA | 1 | SASSLYS | 2 | WYYAPI | 3 | ISSYSM | 32 | YISSYYSYTY | 58 | PAPGYGAL | 87 |
| 13962 | 5044AM | SVSSA | 1 | SASSLYS | 2 | GYFAPI | 9 | LFSYPM | 33 | YISPYYGYTN | 59 | QTAGHAGM | 88 |
| 13963 | 5044AM | SVSSA | 1 | SASSLYS | 2 | WFNAPI | 10 | LSAYSM | 34 | YISSYYGYTY | 51 | PAPGHWGF | 79 |
| 13964 | 5044AM | SVSSA | 1 | SASSLYS | 2 | SNYAPI | 11 | ISSHSM | 35 | YISPFFSFTH | 60 | QAPGVSGI | 89 |
| 13965 | 5044AM | SVSSA | 1 | SASSLYS | 2 | WYNAPI | 12 | LSSYSM | 24 | YISSYDSITD | 61 | PAVGHMAF | 90 |
| 13966 | 5044AM | SVSSA | 1 | SASSLYS | 2 | GFYAPI | 13 | LSSYSM | 24 | YISSYYSYTA | 62 | PTPGHGGL | 91 |
| 13967 | 5044AM | SVSSA | 1 | SASSLYS | 2 | WYYAPI | 3 | ISAYAM | 36 | YISPYYGYTF | 63 | PAPGHGGM | 92 |
| 13968 | 5044AM | SVSSA | 1 | SASSLYS | 2 | GYSAPI | 14 | ISTYSM | 37 | YISPHYGFTS | 64 | PAVGHLGM | 93 |
| 13969 | 5044AM | SVSSA | 1 | SASSLYS | 2 | WYFAPI | 7 | LHAFSM | 38 | YISPYYGYTY | 65 | PAPGHWGL | 94 |
| 13970 | 5044AM | SVSSA | 1 | SASSLYS | 2 | GFYAPI | 13 | ISGYSI | 39 | YISSYYGYTF | 66 | TAPGHGAF | 95 |
| 13971 | 5044AM | SVSSA | 1 | SASSLYS | 2 | GFYAPI | 13 | ISNYSI | 40 | IISSNFGYTS | 67 | PALGHLAM | 96 |
| 13972 | 5044AM | SVSSA | 1 | SASSLYS | 2 | GYAGLI | 15 | ISAYSM | 41 | SISSYYGFTS | 68 | LAPGHPAL | 97 |
| 13973 | 5044AM | SVSSA | 1 | SASSLYS | 2 | GFSSPI | 16 | LTSYAM | 42 | YISPYYGYTY | 65 | PAAGHLAL | 98 |
| 13974 | 5044AM | SVSSA | 1 | SASSLYS | 2 | GYYAPI | 5 | LYSYSI | 43 | YISPSYGSTY | 69 | PIPGHLAF | 99 |
| 13975 | 5044AM | SVSSA | 1 | SASSLYS | 2 | GHYAPI | 17 | LSSFSM | 44 | YISSFNGSTF | 70 | PTWAHGAF | 100 |
| 13976 | 5044AM | SVSSA | 1 | SASSLYS | 2 | SFYAPI | 18 | IASYSI | 45 | YISSYYGSTY | 57 | PVLAHSAF | 101 |
| 13977 | 5044AM | SVSSA | 1 | SASSLYS | 2 | GYRAPI | 19 | IHSNSM | 46 | YISPYYSFTS | 71 | QTPGHSGM | 102 |
| 13978 | 5044AM | SVSSA | 1 | SASSLYS | 2 | WHRAPI | 20 | LSTNSM | 47 | YISPYYSFTY | 72 | QAPGPWGM | 103 |
| 13979 | 5044AM | SVSSA | 1 | SASSLYS | 2 | SFYAPI | 18 | LHSFSM | 48 | FISSYYGYTY | 73 | PAPGHGAF | 104 |
| 13980 | 5044AM | SVSSA | 1 | SASSLYS | 2 | GYYAPI | 5 | LTSYSM | 31 | SISPYYSYTN | 74 | PTTAHMAL | 105 |
| 13981 | 5044AM | SVSSA | 1 | SASSLYS | 2 | WYYAPI | 3 | ISSFSI | 49 | FINPYYSYTY | 75 | PAPGHWGM | 84 |
| 13982 | 5044AM | SVSSA | 1 | SASSLYS | 2 | GYYAPI | 5 | ISSYSM | 32 | YISSYYDYTY | 76 | PTPGHSGF | 106 |
| 13983 | 5044AM | SVSSA | 1 | SASSLYS | 2 | GDFAPF | 21 | LPYYSM | 50 | IISSYFGFTY | 77 | PAVGHGAL | 107 |
| 13984 | 5044AM | SVSSA | 1 | SASSLYS | 2 | GYSSPI | 22 | ISSHSM | 35 | YISPYYSYTY | 53 | TAPGHPAM | 108 |
| 13985 | 5044AM | SVSSA | 1 | SASSLYS | 2 | WFYAPI | 23 | ISSYSI | 27 | YISSNFGSTY | 78 | PVPAHGAF | 109 |

TABLE 2A

| | | FZD4 binding antibodies CDRs | | | | | | | | | | | |
|---|---|---|---|---|---|---|---|---|---|---|---|---|---|
| | | | SEQ | | SEQ | | SEQ | | SEQ | | SEQ | | SEQ |
| Antibody | | | ID | | ID | | ID | | ID | | ID | | ID |
| ID | Library | L1 | NO: | L2 | NO: | L3 | NO: | H1 | NO: | H2 | NO: | H3 | NO: |
| 5027 | F | SVSSA | 1 | SASSLYS | 2 | SSYSLI | 130 | SSFYFM | 148 | TVYPYLDYT | 985 | AFPGSYHPM | 199 |
| | | | | | | | | | | Y | | | |
| 13986 | 5027AM | SVSSA | 1 | SASSLYS | 2 | ASYYLI | 110 | STYFFI | 139 | TIYPYLNSTY | 166 | AYPGSYHPL | 198 |
| 13987 | 5027AM | SVSSA | 1 | SASSLYS | 2 | SNYALI | 111 | TSFYFM | 140 | SVYPYLDNTY | 167 | AFPGSYHPM | 199 |
| 13988 | 5027AM | SVSSA | 1 | SASSLYS | 2 | SSSFLI | 112 | SSFYFI | 141 | TVYSYIDITY | 168 | AFPFSYHPM | 200 |
| 13989 | 5027AM | SVSSA | 1 | SASSLYS | 2 | SSDSLI | 113 | SAYYFI | 142 | TVYPYRGYTY | 169 | GYPLAYTPL | 201 |
| 13990 | 5027AM | SVSSA | 1 | SASSLYS | 2 | STHFLI | 114 | SYFYFM | 143 | SVYPYLSYTY | 170 | AFPGSYHPM | 199 |
| 13991 | 5027AM | SVSSA | 1 | SASSLYS | 2 | ASYSLI | 115 | SSFYFI | 141 | SVYPYLDFTY | 171 | ALQGHYHPM | 202 |
| 13992 | 5027AM | SVSSA | 1 | SASSLYS | 2 | SAYTLI | 116 | TSFYYM | 144 | AIYPYLDYTY | 172 | AFPGSYLPM | 203 |
| 13993 | 5027AM | SVSSA | 1 | SASSLYS | 2 | SSVSLI | 117 | FTFYFM | 145 | SIYPYLNYTF | 173 | AFPGSYHPM | 199 |
| 13994 | 5027AM | SVSSA | 1 | SASSLYS | 2 | SYYSLI | 118 | SSYYFI | 146 | TIYPYSDNTY | 174 | GFPGRYHPL | 204 |
| 13995 | 5027AM | SVSSA | 1 | SASSLYS | 2 | SSYYLI | 119 | SSFYVM | 147 | SIYSYGNITY | 175 | AFPLSYHPM | 205 |
| 13996 | 5027AM | SVSSA | 1 | SASSLYS | 2 | ASYYLI | 110 | SSFYFM | 148 | AIYPYLSYTY | 176 | AFPGRYHGM | 206 |
| 13997 | 5027AM | SVSSA | 1 | SASSLYS | 2 | AYYFLI | 120 | SSFYYI | 149 | TVFPYLGRTY | 177 | AFPFSYTPL | 207 |
| 13998 | 5027AM | SVSSA | 1 | SASSLYS | 2 | SSFSLI | 121 | STFYFM | 150 | SVYPYLNYTY | 178 | AFPGAYSPM | 208 |
| 13999 | 5027AM | SVSSA | 1 | SASSLYS | 2 | SAYSLI | 122 | SAFYYM | 151 | TVYPYLSYTY | 179 | AFPGAYHPM | 209 |
| 14000 | 5027AM | SVSSA | 1 | SASSLYS | 2 | SSYALI | 123 | ASFYFM | 152 | TVYPYLNHTY | 180 | AFPGAYHPF | 210 |
| 14001 | 5027AM | SVSSA | 1 | SASSLYS | 2 | SYFSLI | 124 | SAFYFI | 153 | SIYPYLSYTY | 181 | AFPGAYHPM | 209 |
| 14002 | 5027AM | SVSSA | 1 | SASSLYS | 2 | SRFTLI | 125 | FPFYFM | 154 | SVYPYLNDTY | 182 | AYPGFYHPI | 211 |
| 14003 | 5027AM | SVSSA | 1 | SASSLYS | 2 | SSNTLI | 126 | SAFYFM | 155 | SVYSSLSHTY | 183 | AYPLSYHPM | 212 |
| 14004 | 5027AM | SVSSA | 1 | SASSLYS | 2 | SSFSLI | 121 | ASYYFM | 156 | SVYPYLDFTY | 171 | ALPGFYHPF | 213 |
| 14005 | 5027AM | SVSSA | 1 | SASSLYS | 2 | SSFALI | 127 | SVFYFM | 157 | SVYPYNDITY | 184 | GFPGTYHPL | 214 |
| 14006 | 5027AM | SVSSA | 1 | SASSLYS | 2 | ANYALI | 128 | SSLYYM | 158 | SVYPYLDNTH | 185 | AIPGFYHPI | 215 |
| 14008 | 5027AM | SVSSA | 1 | SASSLYS | 2 | ASYSLI | 115 | SNFYLM | 159 | SIYSYLNYTF | 186 | AFPGSYHPM | 199 |
| 14009 | 5027AM | SVSSA | 1 | SASSLYS | 2 | SSASLI | 129 | FSFYFI | 160 | SIYPYLDFTH | 187 | AFPGSYHPL | 216 |
| 14010 | 5027AM | SVSSA | 1 | SASSLYS | 2 | SSYSLI | 130 | SAFYFM | 155 | AIYPYIGYTY | 188 | PFPASYHPL | 217 |
| 14011 | 5027AM | SVSSA | 1 | SASSLYS | 2 | SSYSLI | 130 | SSLYFM | 161 | TIYPFRGTTY | 189 | AYPGRYHPL | 218 |
| 14012 | 5027AM | SVSSA | 1 | SASSLYS | 2 | SAFYLI | 131 | YYFYYM | 162 | AIYPYLGYTY | 190 | AFPGSYHPL | 216 |
| 14013 | 5027AM | SVSSA | 1 | SASSLYS | 2 | SAYFLI | 132 | SSFYFI | 141 | SVYPYLGDTY | 191 | AFPGFYHPF | 219 |
| 14015 | 5027AM | SVSSA | 1 | SASSLYS | 2 | ASSSLI | 133 | TSYYFI | 163 | SVYSYLGYTF | 192 | AFPGSYHPL | 216 |
| 14016 | 5027AM | SVSSA | 1 | SASSLYS | 2 | SIYSLI | 134 | SYFYFM | 143 | AIYPYLSYTY | 176 | AFPGSYHPM | 199 |
| 14018 | 5027AM | SVSSA | 1 | SASSLYS | 2 | ASYYLI | 110 | FSFYFI | 160 | TVYPYLSHTY | 193 | AFPGSYHPM | 199 |
| 14019 | 5027AM | SVSSA | 1 | SASSLYS | 2 | STGSLI | 135 | SDFYFI | 164 | TIYPFIGNTY | 194 | AFPGSYHPF | 220 |
| 14020 | 5027AM | SVSSA | 1 | SASSLYS | 2 | SSHSLI | 136 | SSFYFM | 148 | SVYPYVDYTY | 195 | AFPGFYHPM | 221 |
| 14021 | 5027AM | SVSSA | 1 | SASSLYS | 2 | SSYTLI | 137 | SSFYYM | 165 | TVYPYLSFTY | 196 | ALPGSYHPF | 222 |
| 14022 | 5027AM | SVSSA | 1 | SASSLYS | 2 | SYHYLI | 138 | STFYFM | 150 | SVYPYLDDTY | 197 | AYPGSYHPL | 198 |

TABLE 2B

| | FZD5 binding antibodies CDRs | | | | | | | | | | | | | |
|---|---|---|---|---|---|---|---|---|---|---|---|---|---|---|
| Anti- | | Selec- | | SEQ | | SEQ | | SEQ | | SEQ | | SEQ | | SEQ |
| body | Antigen | tion | | ID | | ID | | ID | | ID | | ID | | ID |
| ID | Name | ID | L1 | NO: | L2 | NO: | L3 | NO: | H1 | NO: | H2 | NO: | H3 | NO: |
| 14023 | FZD5 | 2919AM | SVSSA | 1 | SASSLYS | 2 | WYSGVHGLI | 223 | LIYTYI | 308 | TIYPASSSTS | 381 | GAM | |
| 14024 | FZD5 | 2919AM | SVSSA | 1 | SASSLYS | 2 | WFSSAHVPF | 224 | ITYPGM | 309 | TIFSSHGSTS | 382 | FGM | |
| 14025 | FZD5 | 2919AM | SVSSA | 1 | SASSLYS | 2 | WYSYGHHLI | 225 | ISYSYM | 310 | SIYSSSSSTS | 383 | GAL | |
| 14026 | FZD5 | 2919AM | SVSSA | 1 | SASSLYS | 2 | WYTSGHVLI | 226 | ISFFYM | 311 | TIDSSTGSTT | 384 | GAL | |
| 14027 | FZD5 | 2919AM | SVSSA | 1 | SASSLYS | 2 | WYASDHGLI | 227 | IPYFYM | 312 | SIYSSSGSTS | 385 | GAM | |
| 14028 | FZD5 | 2919AM | SVSSA | 1 | SASSLYS | 2 | WFSPGNVLI | 228 | ISYYYI | 313 | SIYPSSSSTT | 386 | AAF | |
| 14029 | FZD5 | 2919AM | SVSSA | 1 | SASSLYS | 2 | WYSTRNILI | 229 | ISYAYM | 314 | SIYPSSSSTA | 387 | YAF | |
| 14030 | FZD5 | 2919AM | SVSSA | 1 | SASSLYS | 2 | WYFSDHDLF | 230 | ITYFYM | 315 | SIYPSFGSTS | 388 | GGM | |
| 14031 | FZD5 | 2919AM | SVSSA | 1 | SASSLYS | 2 | WYSSGDVLI | 231 | IYYSYI | 316 | SIYSSNGGTS | 389 | GAM | |
| 14032 | FZD5 | 2919AM | SVSSA | 1 | SASSLYS | 2 | WYSSADVLF | 232 | ILNTYM | 317 | SIYPSSSSTA | 387 | GGL | |
| 14033 | FZD5 | 2919AM | SVSSA | 1 | SASSLYS | 2 | WYSSGHGLI | 233 | ISFYYI | 318 | SIYPASSSTS | 390 | GGI | |
| 14034 | FZD5 | 2919AM | SVSSA | 1 | SASSLYS | 2 | WYSSGHALI | 234 | LAYSYM | 319 | SIYPSSGDTS | 391 | GAM | |
| 14035 | FZD5 | 2919AM | SVSSA | 1 | SASSLYS | 2 | WYSSNHIPI | 235 | IRYSYI | 320 | AIYSSSSSTS | 392 | GAM | |
| 14036 | FZD5 | 2919AM | SVSSA | 1 | SASSLYS | 2 | WYSSSNVLI | 236 | ITYSYM | 321 | TIYPSSGSTA | 393 | FAM | |
| 14037 | FZD5 | 2919AM | SVSSA | 1 | SASSLYS | 2 | WYFSDRVLI | 237 | IINTYM | 322 | SIYSAPSSTA | 394 | GAI | |
| 14038 | FZD5 | 2919AM | SVSSA | 1 | SASSLYS | 2 | WYPSSHVLI | 238 | ISYSYM | 310 | TIYPSSGSTA | 393 | GGM | |
| 14039 | FZD5 | 2919AM | SVSSA | 1 | SASSLYS | 2 | WYSSRHHLI | 239 | LANSYM | 323 | TIYSSSGSTS | 395 | GAM | |
| 14040 | FZD5 | 2919AM | SVSSA | 1 | SASSLYS | 2 | WYSTGRVLF | 240 | LSYTYM | 324 | SIDPSSGSTS | 396 | FGM | |
| 14041 | FZD5 | 2919AM | SVSSA | 1 | SASSLYS | 2 | WFPTGHVLF | 241 | ISYSYI | 325 | TIYPSSGSTG | 397 | FGM | |
| 14042 | FZD5 | 2919AM | SVSSA | 1 | SASSLYS | 2 | WYAPRHVLI | 242 | ISYSYI | 325 | SIYSSSSSTS | 383 | GAM | |
| 14043 | FZD5 | 2919AM | SVSSA | 1 | SASSLYS | 2 | WFTSGLVLF | 243 | LSYLYI | 326 | SIYPSSSSTS | 398 | GGM | |
| 14044 | FZD5 | 2919AM | SVSSA | 1 | SASSLYS | 2 | WYSSGHVLF | 244 | ISYAYI | 327 | SIYSSPSSTS | 399 | GAM | |
| 14045 | FZD5 | 2919AM | SVSSA | 1 | SASSLYS | 2 | WYPGAPVLI | 245 | IAYSYM | 328 | SIYPSSSSTS | 398 | GAM | |
| 14046 | FZD5 | 2919AM | SVSSA | 1 | SASSLYS | 2 | WYSSSNVLI | 236 | FIWESLLVS | 329 | TIYPSSGSTA | 393 | FAM | |
| 14047 | FZD5 | 2919AM | SVSSA | 1 | SASSLYS | 2 | WYSSANALF | 246 | ISHSYM | 330 | SIDSSSGSTS | 400 | GAL | |
| 14048 | FZD5 | 2919AM | SVSSA | 1 | SASSLYS | 2 | WYSSGDVLI | 231 | LRYSYI | 331 | TIYSASGSTT | 401 | GAL | |
| 14049 | FZD5 | 2919AM | SVSSA | 1 | SASSLYS | 2 | WYSSNHVLI | 247 | ISYAYM | 314 | SISPSDSSTS | 402 | GAL | |
| 14050 | FZD5 | 2919AM | SVSSA | 1 | SASSLYS | 2 | WYSAAHILF | 248 | ISYSYM | 310 | SIDPSSGLTS | 403 | GAL | |
| 14051 | FZD5 | 2919AM | SVSSA | 1 | SASSLYS | 2 | WFASGHVLI | 249 | IRYAYM | 332 | TIDSFSGSTS | 404 | YAM | |
| 14052 | FZD5 | 2919AM | SVSSA | 1 | SASSLYS | 2 | WFSSGDSLI | 250 | ITHLYM | 333 | SIYPSSGSTS | 405 | AAL | |
| 14053 | FZD5 | 2919AM | SVSSA | 1 | SASSLYS | 2 | WYASGNVLI | 251 | LSIFYM | 334 | TIYPSSSSTS | 406 | GAF | |
| 14054 | FZD5 | 2919AM | SVSSA | 1 | SASSLYS | 2 | WFSPGHLLI | 252 | LSYSYI | 335 | AIYPSPSSTS | 407 | GAM | |
| 14055 | FZD5 | 2919AM | SVSSA | 1 | SASSLYS | 2 | WYPSGHVLF | 253 | ISYSFM | 336 | SIYSTSGSTS | 408 | GGL | |
| 14056 | FZD5 | 2919AM | SVSSA | 1 | SASSLYS | 2 | WFAAGHVLI | 254 | IAYVGI | 337 | AITPSSSNTS | 409 | FGF | |
| 14057 | FZD5 | 2919AM | SVSSA | 1 | SASSLYS | 2 | WFRSAHVLI | 255 | LSYSYM | 338 | SIDPSSSSTA | 410 | FGF | |
| 14058 | FZD5 | 2919AM | SVSSA | 1 | SASSLYS | 2 | WFASGHILI | 256 | ISYSFM | 336 | SIYSRSGSTA | 411 | GAM | |
| 14059 | FZD5 | 2919AM | SVSSA | 1 | SASSLYS | 2 | WFSGGHALI | 257 | IAYFYI | 339 | TIDPSSGSTS | 412 | GGL | |
| 14060 | FZD5 | 2919AM | SVSSA | 1 | SASSLYS | 2 | WFASAHVLF | 258 | LSSSYM | 340 | SIGPSSGSTS | 413 | FGF | |
| 14061 | FZD5 | 2919AM | SVSSA | 1 | SASSLYS | 2 | WYSPGHVLI | 259 | LSYSYM | 338 | SIYPSSSSTS | 398 | GGI | |
| 14062 | FZD5 | 2919AM | SVSSA | 1 | SASSLYS | 2 | WYASGLVLI | 260 | IYYSYM | 341 | SIDPSSSSTS | 414 | GGM | |
| 14063 | FZD5 | 2919AM | SVSSA | 1 | SASSLYS | 2 | WYTSGHVLF | 261 | ITYSYM | 321 | SIYPSPSSTS | 415 | GGM | |
| 14064 | FZD5 | 2919AM | SVSSA | 1 | SASSLYS | 2 | WFSFPHALI | 262 | LHYGGI | 342 | SISSSFSSTS | 416 | FGF | |
| 14066 | FZD5 | 2919AM | SVSSA | 1 | SASSLYS | 2 | WYASGTDLI | 263 | ISYSYM | 310 | TIYSSSSSTA | 417 | GGM | |
| 14067 | FZD5 | 2919AM | SVSSA | 1 | SASSLYS | 2 | WYSSGRLLI | 264 | IGYAYM | 343 | SIYSSPGSTA | 418 | GAL | |
| 14068 | FZD5 | 2919AM | SVSSA | 1 | SASSLYS | 2 | WFSSPHVLF | 265 | LSYSSI | 344 | SICPFCSSTS | 419 | FGF | |
| 14069 | FZD5 | 2919AM | SVSSA | 1 | SASSLYS | 2 | WFASASSLF | 266 | LSYDGI | 345 | TIYSSSGSTS | 395 | FGL | |
| 14070 | FZD5 | 2919AM | SVSSA | 1 | SASSLYS | 2 | WYPSSHVLF | 267 | LSYAYM | 346 | SIHPFDGSTS | 420 | GAL | |
| 14071 | FZD5 | 2919AM | SVSSA | 1 | SASSLYS | 2 | WFPAHHVLF | 268 | ISYSGI | 347 | SISSSSGSTA | 421 | FGM | |
| 14072 | FZD5 | 2919AM | SVSSA | 1 | SASSLYS | 2 | WFPSGNVLF | 269 | ISSSYM | 348 | TIDPYAGSTS | 422 | FAM | |
| 14073 | FZD5 | 2919AM | SVSSA | 1 | SASSLYS | 2 | WYSSNNVLI | 270 | LSYSYM | 338 | SIYPSSGSTA | 423 | GGM | |
| 14074 | FZD5 | 2919AM | SVSSA | 1 | SASSLYS | 2 | WFSSRHVLF | 271 | LSYSGM | 349 | TIYPSSSSTS | 406 | FGM | |
| 14075 | FZD5 | 2919AM | SVSSA | 1 | SASSLYS | 2 | WYFSDHDLI | 272 | GFTISYFFM | 350 | SIYPSDSSTS | 424 | GAM | |
| 14076 | FZD5 | 2919AM | SVSSA | 1 | SASSLYS | 2 | WYSSGGVLI | 273 | ISYSFI | 351 | SIYPSSGHTS | 425 | GAL | |
| 14077 | FZD5 | 2919AM | SVSSA | 1 | SASSLYS | 2 | WFPSGHVLF | 274 | ISYSYM | 310 | SIDPSSGSTS | 396 | FGM | |
| 14078 | FZD5 | 2919AM | SVSSA | 1 | SASSLYS | 2 | WYSSTHVLF | 275 | LSYTYM | 324 | SIYSSPGSTS | 426 | GGM | |
| 14079 | FZD5 | 2919AM | SVSSA | 1 | SASSLYS | 2 | WYSSGSALI | 276 | ISHAYM | 352 | SIYSSPGSTA | 418 | FAL | |
| 14080 | FZD5 | 2919AM | SVSSA | 1 | SASSLYS | 2 | WFSPGSVLI | 277 | LLFFYM | 353 | SIDPSSGFTS | 427 | GAM | |
| 14081 | FZD5 | 2919AM | SVSSA | 1 | SASSLYS | 2 | WYPSAHILF | 278 | IAYSYM | 328 | SIYPASSSTS | 390 | GGM | |
| 14082 | FZD5 | 2919AM | SVSSA | 1 | SASSLYS | 2 | WYGSGGILI | 279 | LSYFYM | 354 | SIFSSSSSTS | 428 | GAM | |
| 14083 | FZD5 | 2919AM | SVSSA | 1 | SASSLYS | 2 | WFTSGRDLF | 280 | GFTLISSSI | 355 | SIYPAPSSTP | 429 | GGM | |
| 14084 | FZD5 | 2919AM | SVSSA | 1 | SASSLYS | 2 | WYLSRNILI | 281 | LSYSYI | 335 | SIYSSSSSTS | 383 | GAM | |
| 14085 | FZD5 | 2919AM | SVSSA | 1 | SASSLYS | 2 | WFSGRDALF | 282 | ITNSYM | 356 | SIYSSPSSTS | 399 | GGL | |
| 14369 | FZD5 | 2928AM | SVSSA | 1 | SASSLYS | 2 | AFFYPI | 283 | ISFSSI | 357 | SIYPSYGSSF | 430 | YYAF | 483 |
| 14370 | FZD5 | 2928AM | SVSSA | 1 | SASSLYS | 2 | AFYFPI | 284 | ISYSSM | 358 | TIYPYYSSTL | 431 | YYAF | 483 |
| 14371 | FZD5 | 2928AM | SVSSA | 1 | SASSLYS | 2 | AHYFPI | 285 | ISYSSM | 358 | SIYSSYSSTY | 432 | YYAM | 484 |
| 14372 | FZD5 | 2928AM | SVSSA | 1 | SASSLYS | 2 | AFYFPI | 284 | ISYSSM | 358 | SIYPSYSVTY | 433 | YYGM | 485 |
| 14373 | FZD5 | 2928AM | SVSSA | 1 | SASSLYS | 2 | SHYYPI | 286 | LSFSSM | 359 | SIYPYYGSTF | 434 | YYAM | 484 |
| 14374 | FZD5 | 2928AM | SVSSA | 1 | SASSLYS | 2 | AFYFPI | 284 | ISYSSM | 358 | SIYSSYSSTY | 432 | YYGF | 486 |
| 14375 | FZD5 | 2928AM | SVSSA | 1 | SASSLYS | 2 | GFYYPI | 287 | ISFGSI | 360 | SIYPSYSSTF | 435 | YYAM | 484 |
| 14376 | FZD5 | 2928AM | SVSSA | 1 | SASSLYS | 2 | AFYYPI | 288 | ITYSSI | 361 | SIYPAYSSTY | 436 | YYAF | 483 |
| 14377 | FZD5 | 2928AM | SVSSA | 1 | SASSLYS | 2 | SFYFPI | 289 | ISYSAI | 362 | SIYSSYSSTF | 437 | YYAM | 484 |
| 14378 | FZD5 | 2928AM | SVSSA | 1 | SASSLYS | 2 | AFYFPI | 284 | ISYSSM | 358 | SIYSSYGSTY | 438 | YYAM | 484 |
| 14379 | FZD5 | 2928AM | SVSSA | 1 | SASSLYS | 2 | ADYFPI | 290 | ISYSSM | 358 | SIYPSYSSTY | 439 | YYGM | 485 |
| 14380 | FZD5 | 2928AM | SVSSA | 1 | SASSLYS | 2 | AFYYPI | 288 | ISYSSI | 363 | SIYSYYGSTY | 440 | YYAM | 484 |
| 14381 | FZD5 | 2928AM | SVSSA | 1 | SASSLYS | 2 | AFYFPI | 284 | ISFSSI | 357 | TIYSLFGATF | 441 | YYGF | 486 |
| 14382 | FZD5 | 2928AM | SVSSA | 1 | SASSLYS | 2 | SFYFPI | 289 | ISYSSM | 358 | SIYPSYSSTY | 439 | YYAF | 483 |
| 14383 | FZD5 | 2928AM | SVSSA | 1 | SASSLYS | 2 | AFHYPI | 291 | ISFSSI | 357 | SIYPSYSSTY | 439 | YYAM | 484 |
| 14384 | FZD5 | 2928AM | SVSSA | 1 | SASSLYS | 2 | AFYYPI | 288 | ISFSSI | 357 | SIYPAYGATF | 442 | YYGM | 485 |
| 14385 | FZD5 | 2928AM | SVSSA | 1 | SASSLYS | 2 | AYYYPI | 292 | ISYSSI | 363 | SIYSSYSSTF | 437 | YYAF | 483 |
| 14386 | FZD5 | 2928AM | SVSSA | 1 | SASSLYS | 2 | VFYYPI | 293 | ISYSSM | 358 | SIYSSYSSTY | 432 | YYAF | 483 |
| 14387 | FZD5 | 2928AM | SVSSA | 1 | SASSLYS | 2 | SFYFPI | 289 | ISYSSM | 358 | SIYPYYSSTY | 443 | YYAM | 484 |
| 14388 | FZD5 | 2928AM | SVSSA | 1 | SASSLYS | 2 | AFYFPI | 284 | LSYSSM | 364 | SIYPAYSSTY | 436 | YYGM | 485 |
| 14389 | FZD5 | 2928AM | SVSSA | 1 | SASSLYS | 2 | ANYFPI | 294 | ISFGSI | 360 | SIYSSYSSTY | 432 | YYAM | 484 |
| 14390 | FZD5 | 2928AM | SVSSA | 1 | SASSLYS | 2 | GFYFPI | 295 | ISYSSI | 363 | SIYPSFGSTY | 444 | YYAM | 484 |
| 14391 | FZD5 | 2928AM | SVSSA | 1 | SASSLYS | 2 | AFYFPI | 284 | ISYSSM | 358 | SIYPSFSPTY | 445 | YYGM | 485 |
| 14392 | FZD5 | 2928AM | SVSSA | 1 | SASSLYS | 2 | AFYFPI | 284 | IAYSSM | 365 | SIYSSYGSTF | 446 | YYAF | 483 |
| 14393 | FZD5 | 2928AM | SVSSA | 1 | SASSLYS | 2 | AYYFPI | 296 | ISYSSI | 363 | SIYPAYSPTY | 447 | YYAF | 483 |
| 14394 | FZD5 | 2928AM | SVSSA | 1 | SASSLYS | 2 | AFIFPI | 297 | ISYSAM | 366 | SIYPSYSSTY | 439 | YYAL | 487 |
| 14395 | FZD5 | 2928AM | SVSSA | 1 | SASSLYS | 2 | AYYYPI | 292 | ISYGVI | 367 | SIYSAYSSTF | 448 | YYAF | 483 |
| 14396 | FZD5 | 2928AM | SVSSA | 1 | SASSLYS | 2 | SFYFPI | 289 | ISYSSI | 363 | TIYPYYDPTY | 449 | YYAF | 483 |
| 14397 | FZD5 | 2928AM | SVSSA | 1 | SASSLYS | 2 | AFYFPI | 284 | LSYSSM | 364 | SIYSSYGSTY | 438 | YYAM | 484 |
| 14398 | FZD5 | 2928AM | SVSSA | 1 | SASSLYS | 2 | AFYYPI | 288 | ISYSSI | 363 | SIYPSYGSTY | 450 | YYGM | 485 |
| 14399 | FZD5 | 2928AM | SVSSA | 1 | SASSLYS | 2 | AFYFPI | 284 | ISYSSM | 358 | SIYPHYGATF | 451 | YYGM | 485 |
| 14400 | FZD5 | 2928AM | SVSSA | 1 | SASSLYS | 2 | AFYYPI | 288 | ISYSSI | 363 | SIYPSYGSTF | 452 | YYAM | 484 |
| 14401 | FZD5 | 2928AM | SVSSA | 1 | SASSLYS | 2 | AFFFPI | 298 | ISYSSI | 363 | SIYSSYSATY | 453 | YYAM | 484 |
| 14402 | FZD5 | 2928AM | SVSSA | 1 | SASSLYS | 2 | SFYYPI | 299 | ISYSSM | 358 | SIYPSYSSTY | 439 | YYAF | 483 |
| 14403 | FZD5 | 2928AM | SVSSA | 1 | SASSLYS | 2 | AFYFPI | 284 | IPYGSM | 368 | SIYPSYGSTF | 452 | YYAM | 484 |
| 14404 | FZD5 | 2928AM | SVSSA | 1 | SASSLYS | 2 | ALYYPI | 300 | ISYSSM | 358 | SIYPSYSSTF | 435 | YYAM | 484 |
| 14405 | FZD5 | 2928AM | SVSSA | 1 | SASSLYS | 2 | AFYFPI | 284 | ISYSAM | 366 | SIYPYYGPTY | 454 | YYAF | 483 |
| 14406 | FZD5 | 2928AM | SVSSA | 1 | SASSLYS | 2 | VFYYPI | 293 | ISYSSI | 363 | SIYPFYGSTF | 455 | FYAF | 488 |
| 14407 | FZD5 | 2928AM | SVSSA | 1 | SASSLYS | 2 | RFYFPI | 301 | ISYSSI | 363 | AIYPSYSSTN | 456 | YYAM | 484 |
| 14408 | FZD5 | 2928AM | SVSSA | 1 | SASSLYS | 2 | AFYYPI | 288 | ISYSSI | 363 | SIYPYYSSTH | 457 | YYAM | 484 |
| 14409 | FZD5 | 2928AM | SVSSA | 1 | SASSLYS | 2 | LYYFPI | 302 | IAYSAM | 369 | SIYPSYSTTY | 458 | YYAM | 484 |
| 14410 | FZD5 | 2928AM | SVSSA | 1 | SASSLYS | 2 | AFYFPI | 284 | LSFSSI | 370 | SIYPSYSSTF | 435 | YYAF | 483 |
| 14411 | FZD5 | 2928AM | SVSSA | 1 | SASSLYS | 2 | AYYFPI | 296 | ISYSSM | 358 | SIYSSYGSTY | 438 | YYGM | 485 |
| 14412 | FZD5 | 2928AM | SVSSA | 1 | SASSLYS | 2 | SSYFPI | 303 | ISYSSM | 358 | SIYSNYSSSY | 459 | YYAM | 484 |
| 14413 | FZD5 | 2928AM | SVSSA | 1 | SASSLYS | 2 | AFYFPI | 284 | LTYSSI | 371 | TIYPSYGSTY | 460 | YYAM | 484 |
| 14414 | FZD5 | 2928AM | SVSSA | 1 | SASSLYS | 2 | AFYFPI | 284 | ISYSSM | 358 | SIYPSFGSTF | 461 | YYAI | 489 |
| 14415 | FZD5 | 2928AM | SVSSA | 1 | SASSLYS | 2 | AHYFPI | 285 | LSYGSI | 372 | SIYPSYGSTY | 450 | YYGM | 485 |
| 14416 | FZD5 | 2928AM | SVSSA | 1 | SASSLYS | 2 | ASYFPI | 304 | ISYSSM | 358 | TIYPSYSSTY | 462 | YYAM | 484 |
| 14417 | FZD5 | 2928AM | SVSSA | 1 | SASSLYS | 2 | AFYFPI | 284 | IAYSSM | 365 | TIYSSYGATS | 463 | YYAF | 483 |
| 14418 | FZD5 | 2928AM | SVSSA | 1 | SASSLYS | 2 | AHYYPI | 305 | ISYSSI | 363 | SIYPSYSSTI | 464 | YYAM | 484 |
| 14419 | FZD5 | 2928AM | SVSSA | 1 | SASSLYS | 2 | AGFFPI | 306 | ISYSSI | 363 | TIYPYYGATY | 465 | YYGF | 486 |
| 14420 | FZD5 | 2928AM | SVSSA | 1 | SASSLYS | 2 | SSYYPI | 307 | ISYSSI | 363 | SIYSGYSATY | 466 | YYAM | 484 |
| 14421 | FZD5 | 2928AM | SVSSA | 1 | SASSLYS | 2 | AFYFPI | 284 | ITYSSM | 373 | SIYPSYGSTY | 450 | YYGF | 486 |
| 14422 | FZD5 | 2928AM | SVSSA | 1 | SASSLYS | 2 | AFYFPI | 284 | ISYSSI | 363 | TIYPSYSSTY | 462 | YYAM | 484 |
| 14423 | FZD5 | 2928AM | SVSSA | 1 | SASSLYS | 2 | AFYFPI | 284 | LGYGSM | 374 | SIYPSYGSTY | 450 | YYAM | 484 |
| 14424 | FZD5 | 2928AM | SVSSA | 1 | SASSLYS | 2 | AFYFPI | 284 | ISYSSM | 358 | SIYPSYSATF | 467 | YFAL | 490 |
| 14425 | FZD5 | 2928AM | SVSSA | 1 | SASSLYS | 2 | AFYYPI | 288 | IGYSSI | 375 | TIYPSYSSTF | 468 | YYAF | 483 |
| 14426 | FZD5 | 2928AM | SVSSA | 1 | SASSLYS | 2 | AFYYPI | 288 | ITYGSI | 376 | AIYSSYGSTY | 469 | YYAF | 483 |
| 14427 | FZD5 | 2928AM | SVSSA | 1 | SASSLYS | 2 | AFYYPI | 288 | ISYSSM | 358 | SIFPYYGSTY | 470 | YYGF | 486 |
| 14428 | FZD5 | 2928AM | SVSSA | 1 | SASSLYS | 2 | AFYFPI | 284 | ISYSSM | 358 | SIYPFYSTTF | 471 | YYAM | 484 |
| 14429 | FZD5 | 2928AM | SVSSA | 1 | SASSLYS | 2 | SSYYPI | 307 | ISYGSM | 377 | SIYPSYSATF | 467 | YYGM | 485 |
| 14430 | FZD5 | 2928AM | SVSSA | 1 | SASSLYS | 2 | AFYYPI | 288 | ISYSSM | 358 | SIYPSYGSTS | 472 | YYGM | 485 |
| 14431 | FZD5 | 2928AM | SVSSA | 1 | SASSLYS | 2 | AFYFPI | 284 | IYYSSM | 378 | SIYPTYGSTV | 473 | YYGM | 485 |
| 14432 | FZD5 | 2928AM | SVSSA | 1 | SASSLYS | 2 | AFYFPI | 284 | ISYSSI | 363 | TIYPNYSSTY | 474 | YYAM | 484 |
| 14433 | FZD5 | 2928AM | SVSSA | 1 | SASSLYS | 2 | AFYFPI | 284 | IFYSSM | 379 | SIYPSYSATY | 475 | YYAM | 484 |
| 14434 | FZD5 | 2928AM | SVSSA | 1 | SASSLYS | 2 | AFYYPI | 288 | ISYSSM | 358 | SIYPGYSSTY | 476 | YYAM | 484 |
| 14435 | FZD5 | 2928AM | SVSSA | 1 | SASSLYS | 2 | AHYFPI | 285 | IAYSSM | 365 | TIYPSYSSTY | 462 | YYAM | 484 |
| 14436 | FZD5 | 2928AM | SVSSA | 1 | SASSLYS | 2 | AFYYPI | 288 | ISYSSI | 363 | SIYPSYSSTS | 477 | YYGM | 485 |
| 14437 | FZD5 | 2928AM | SVSSA | 1 | SASSLYS | 2 | AFYFPI | 284 | ISYSSM | 358 | SIYSGYGSTY | 478 | YYGM | 485 |
| 14438 | FZD5 | 2928AM | SVSSA | 1 | SASSLYS | 2 | AFYFPI | 284 | ISYSSM | 358 | SIYPSYGSTY | 450 | YYGM | 485 |
| 14439 | FZD5 | 2928AM | SVSSA | 1 | SASSLYS | 2 | AFYFPI | 284 | LSFSSM | 359 | SIYSGYSATY | 466 | YYAL | 487 |
| 14440 | FZD5 | 2928AM | SVSSA | 1 | SASSLYS | 2 | AYYFPI | 296 | ISYSSM | 358 | SIYPSYGSTN | 479 | YYAF | 483 |
| 14441 | FZD5 | 2928AM | SVSSA | 1 | SASSLYS | 2 | AFYFPI | 284 | LSYSSI | 344 | SIYPTYGSAY | 480 | YYGM | 485 |
| 14442 | FZD5 | 2928AM | SVSSA | 1 | SASSLYS | 2 | AFYFPI | 284 | ITYSSM | 373 | TIYSSYGSTY | 481 | YYAM | 484 |
| 14443 | FZD5 | 2928AM | SVSSA | 1 | SASSLYS | 2 | AFYFPI | 284 | ISFSSM | 380 | AIYPYYGSTY | 482 | YYGF | 486 |
| 14444 | FZD5 | 2928AM | SVSSA | 1 | SASSLYS | 2 | AHYFPI | 285 | ISYSSM | 358 | SIYSSYGSTY | 438 | YYGM | 485 |
| 14445 | FZD5 | 2928AM | SVSSA | 1 | SASSLYS | 2 | ASYFPI | 304 | LSYSSM | 364 | SIYPSYSSTF | 435 | YYAM | 484 |
| 14446 | FZD5 | 2928AM | SVSSA | 1 | SASSLYS | 2 | AFYYPI | 288 | ISYGSM | 377 | SIYPSYGSTY | 450 | YYGM | 485 |

### Example 2: Identification and Characterization of LRP Binding Synthetic Antibodies

[0187] A. Phage Clonal ELISA of Synthetic Antibodies Targeting LRP5 and LRP6.

[0188] Single point ELISAs were performed on 96-well Maxisorp plates coated with the ECDs of mouse LRP5-his protein or human Fc and blocked with BSA (0.5%). The plates were incubated with monoclonal Fab-phage, or VH-phage and titers >10⁹ phage/ml followed by incubation with horseradish peroxidase (HRP)-conjugated anti-M13 antibody. The wells were washed 8 times followed by incubations with 3,3,′5,5′-tetramethylbenidine/H₂O₂ peroxidase (TMB) substrate for 5-10 min. the reaction was stopped by adding 1M H₃PO₄ and the absorbance was measured spectrophotometrically at 450 nm in a microtiter plate reader. The results are presented in FIG. 4. The results demonstrate that the synthetic antibodies bound to LRP5. LRP5 binding antibodies, 2459, 2460 and 8716, are described in U.S. provisional application No. 62/886,913, incorporated herein by reference.

[0189] Single point ELISAs were performed on 96-well Maxisorp plates coated with the ECDs of human LRP6-Fc protein chimeras. The plates were incubated with the monoclonal Fab-phage, or VH-phage and titers >109 phage/ml followed by incubation with horseradish peroxidase (HRP)-conjugated anti-M13 antibody. The wells were washed 8 times followed by incubations with 3,3,′5,5′-tetramethylbenidine/H₂O₂ peroxidase (TMB) substrate for 5-10 min. the reaction was stopped by adding 1M H₃PO₄ and the absorbance was measured spectrophotometrically at 450 nm in a microtiter plate reader. The results are presented in FIGS. 5A and 5B. The results demonstrate the synthetic antibodies bound to LRP6. LRP6 binding antibodies, 2539, 2540, and 2542 are described in U.S. provisional application No. 62/886,918, incorporated herein by reference.

[0190] B. Identification of the CDRs of the Synthetic Antibodies Targeting LRP5 and LRP6.

[0191] The CDRs of the LRP5-binding and LRP6-binding immunoglobulins set forth in Tables 3 and 4 were identified according to the INTERNATIONAL IMMUNOGENETICS INFORMATION SYSTEM (IMGT numbering system; Lefranc et al., 2003, Development and Comparative Immunology 27:55-77) and annotated as described in Persson et al. J Mol Biol. 2013 Feb. 22; 425(4):803-11, both incorporated herein by reference.

TABLE 3

| | | | LRP5-binding antibodies CDRs | | | | | | | | | | | |
|---|---|---|---|---|---|---|---|---|---|---|---|---|---|---|
| Anti- | | | | SEQ | | SEQ | | SEQ | | SEQ | | SEQ | | SEQ |
| body | LRP5-antibody | | | ID | | ID | | ID | | ID | | ID | | ID |
| ID | Library | Antigen | L1 | NO: | L2 | NO: | L3 | NO: | H1 | NO: | H2 | NO: | H3 | NO: |
| 2459 | F | mLRP5-his | SVSSA | 1 | SASSLYS | 2 | ASYAPI | 492 | LSYYYM | 527 | SIYSSYGYTY | 552 | WSHVSGHYSGM | 584 |
| 2460 | F | mLRP5-his | SVSSA | 1 | SASSLYS | 2 | SSYSLI | 130 | FSSSSI | 528 | SISSSYGYTY | 553 | GGSGVSHYGSVYYSWWAL | 585 |
| 8716 | F | mLRP5-his | SVSSA | 1 | SASSLYS | 2 | YWAYYSP | 493 | FSSSSI | 528 | SISSSYGYTY | 553 | SWAM | 586 |
| | | | | | | | I | | | | | | | |
| 9931 | F | mLRP5-his | SVSSA | 1 | SASSLYS | 2 | SSSGHLI | 494 | LYYYSM | 529 | YISSYYSYTS | 554 | WSHVVGAHYGWAI | 587 |
| 9932 | F | mLRP5-his | SVSSA | 1 | SASSLYS | 2 | PYGYPI | 495 | IYYYSM | 530 | SISSYYGYTS | 555 | SWWYWSYHGYAAM | 588 |
| 9933 | F | mLRP5-his | SVSSA | 1 | SASSLYS | 2 | FHGLI | 496 | ISSSYM | 348 | SIYSYSSYTS | 556 | GYSYVWYGVYYHGYGAM | 589 |
| 9934 | F | mLRP5-his | SVSSA | 1 | SASSLYS | 2 | YWFLI | 497 | LYYYYI | 531 | SISPYYGYTS | 557 | SGYGWYAM | 590 |
| 9935 | F | mLRP5-his | SVSSA | 1 | SASSLYS | 2 | HSYGYPI | 498 | ISYSYM | 310 | SISSSYGYTY | 553 | SYYWGYWAAL | 591 |
| 9936 | F | mLRP5-his | SVSSA | 1 | SASSLYS | 2 | YYAWYLI | 499 | ISYYSM | 532 | SIYSSYGYTY | 552 | GGVYYYPSYAGWPYGM | 592 |
| 9937 | F | mLRP5-his | SVSSA | 1 | SASSLYS | 2 | AAYSPI | 500 | ISSSYM | 348 | SIYPSYGYTY | 558 | HYAWWVGAF | 593 |
| 9938 | F | mLRP5-his | SVSSA | 1 | SASSLYS | 2 | YYSWYPP | 501 | ISYSYM | 310 | SIYSYYSYTS | 559 | GGGAHGWGYSL | 594 |
| | | | | | | | F | | | | | | | |
| 9939 | F | mLRP5-his | SVSSA | 1 | SASSLYS | | SFYPI | 502 | LSSYSI | 29 | SIYPYYGYTS | 560 | SGPVYASYSWAWYYYGAL | 595 |
| 9940 | F | mLRP5-his | SVSSA | 1 | SASSLYS | 2 | YYWYPF | 503 | LSYYYI | 533 | SIYSYYSSTY | 561 | YSWGAYGYGAM | 596 |
| 9941 | F | mLRP5-his | SVSSA | 1 | SASSLYS | 2 | WGSPI | 504 | FSSSSI | 528 | SIYPSSGSTY | 562 | YYYHYSVPVYAAL | 597 |
| 9942 | F | mLRP5-his | SVSSA | 1 | SASSLYS | 2 | YSSWYLI | 505 | LYYYSM | 529 | SIYPSSGSTY | 562 | SPYYGFYYSGFYHWVFYGF | 598 |
| 9943 | F | mLRP5-his | SVSSA | 1 | SASSLYS | 2 | GAYLI | 506 | LYYSSM | 534 | YIYSYYGYTY | 563 | AAWGWHPAF | 599 |
| 9944 | F | mLRP5-his | SVSSA | 1 | SASSLYS | 2 | HFYYYPI | 507 | IYSSYI | 535 | YISSYYGSTY | 57 | GGGFYYAGGWPYASYAWAF | 600 |
| 9945 | F | mLRP5-his | SVSSA | 1 | SASSLYS | 2 | AFHSPI | 508 | LYYSSM | 534 | YIYPYYGYTS | 564 | AWYSYYVGL | 601 |
| 9946 | F | mLRP5-his | SVSSA | 1 | SASSLYS | 2 | AWYPI | 509 | ISYSSM | 358 | SIYPYYGSTY | 565 | GVYYGGGYWAGGYYPAAL | 602 |
| 12600 | H | mLRP5-his | SVSSA | 1 | SASDLYS | 491 | YAGAGLI | 510 | FTAYAM | 536 | SIYPSGGYTA | 566 | RSYYFAL | 603 |
| 12601 | H | mLRP5-his | SVSSA | 1 | SASDLYS | 491 | SYSYPI | 511 | LGGYGI | 537 | GIYPSGGYTA | 567 | SSTYSSYYYHFYAL | 604 |
| 12602 | H | mLRP5-his | SVSSA | 1 | SASDLYS | 491 | YYRSRLI | 512 | FASAWM | 538 | RISPSGGYTA | 568 | STRWHSAYAYYYSHAM | 605 |
| 12603 | H | mLRP5-his | SVSSA | 1 | SASDLYS | 491 | SYFYPI | 513 | IGGAAM | 539 | GISASGGATA | 569 | SRPSWYWSYHYFAL | 606 |
| 12604 | H | mLRP5-his | SVSSA | 1 | SASDLYS | 491 | GFFPI | 514 | FSSSSI | 528 | GISTSGGATA | 570 | SYYGYSRGF | 607 |
| 12605 | H | mLRP5-his | SVSSA | 1 | SASDLYS | 491 | SHSYPI | 515 | FASYGM | 540 | SIYPSGGYTA | 566 | SYSFHYAWPRYHYGAL | 608 |
| 12606 | H | mLRP5-his | SVSSA | 1 | SASDLYS | 491 | SHYYPI | 286 | IAGSSI | 541 | GISASGGYTA | 571 | YDSGYYAWYYHDRAM | 609 |
| 12607 | H | mLRP5-his | SVSSA | 1 | SASDLYS | 491 | RGSGPI | 516 | LTGDW | 542 | GIYPSGGATA | 572 | FGSPHYGM | 610 |
| | | | | | | | | | M | | | | | |
| 12608 | H | mLRP5-his | SVSSA | 1 | SASDLYS | 491 | RYSGGLI | 517 | FTSYSM | 543 | GIYPSGGSTA | 573 | PRYYAYYSGGF | 611 |
| 12609 | H | mLRP5-his | SVSSA | 1 | SASDLYS | 491 | SARYYYLI | 518 | LNAAAM | 544 | GISASRGATA | 574 | SHSSGSRSRGL | 612 |
| 12610 | H | mLRP5-his | SVSSA | 1 | SASDLYS | 491 | SSYSLI | 130 | LAGAGM | 545 | RISTSGGYTA | 575 | YSFRYPSYAM | 613 |
| 12611 | H | mLRP5-his | SVSSA | 1 | SASDLYS | 491 | SYRGYYLI | 519 | IGGAAM | 539 | GIYASGGATA | 576 | GSRYSGF | 614 |
| 13218 | 2539AM | mLRP5-his | SVSSA | 1 | SASSLYS | 2 | FSWGLI | 520 | ISYYPM | 546 | YISPYSGYTF | 577 | HYYFRWSRGM | 615 |
| 13219 | 2539AM | mLRP5-his | SVSSA | 1 | SASSLYS | 2 | YSWLPI | 521 | IVFGSI | 547 | HIAPYYGFTY | 578 | VNFIRRFRGM | 616 |
| 13378 | 2542AM | mLRP5-his | SVSSA | 1 | SASSLYS | 2 | FFRPI | 522 | ISSNYI | 548 | SINPSYSYTF | 579 | AVRRSQGI | 617 |
| 13379 | 2539AM | mLRP5-his | SVSSA | 1 | SASSLYS | 2 | YSRRLF | 523 | LTYTSM | 549 | SISPFHGHTF | 580 | FPYFAWVGGM | 618 |
| 13380 | 2539AM | mLRP5-his | SVSSA | 1 | SASSLYS | 2 | FIRVPI | 524 | ITYYSM | 550 | SITSYYGNTD | 581 | SHYFPWTVAL | 619 |
| 13558 | 2540AM | mLRP5-his | SVSSA | 1 | SASSLYS | 2 | FYVPF | 525 | N.D. | | SIYPYYGFTD | 582 | ASYHASFDGL | 620 |
| 13559 | 2540AM | mLRP5-his | SVSSA | 1 | SASSLYS | 2 | GYSFGQ | 526 | IADSSI | 551 | SISPYFSYTR | 583 | TSIFKRFAGM | 621 |

TABLE 4

| | | | LRP6 binding antibodies CDRs | | | | | | | | | | | |
|---|---|---|---|---|---|---|---|---|---|---|---|---|---|---|
| | | | | SEQ | | SEQ | | SEQ | | SEQ | | SEQ | | SEQ |
| Antibody | LRP6-antibody | | | ID | | ID | | ID | | ID | | ID | | ID |
| ID | Library | Antigen | L1 | NO: | L2 | NO: | L3 | NO: | H1 | NO: | H2 | NO: | H3 | NO: |
| 2539 | F | LRP6-Fc | SVSSA | 1 | SASSLYS | 2 | YSWGPF | 622 | ISYSSI | 363 | YISSYYGYTY | 51 | AHYFPWAGAM | 813 |
| 2542 | F | LRP6-Fc | SVSSA | 1 | SASSLYS | 2 | YYWPI | 623 | ISSYYI | 683 | SIYSSYGYTS | 741 | TVRGSKKPYFSGWAM | 814 |
| 2540 | F | LRP6-Fc | SVSSA | 1 | SASSLYS | 2 | YYFLI | 624 | ISYSSI | 363 | SISPYYGYTY | 742 | SSYFPWFSAM | 815 |
| 12612 | H | LRP6-Fc | SVSSA | 1 | SASDLYS | 491 | YRYYWRPI | 625 | FSGDAM | 684 | RISSSGGYTA | 743 | ASYYSNYYYGPAM | 816 |
| 12613 | H | LRP6-Fc | SVSSA | 1 | SASDLYS | 491 | GPWGLI | 626 | ISGAWM | 685 | RIYPSGGTTD | 744 | GWFSFRSYYRSYYYYSA | 817 |
| | | | | | | | | | | | | | L | |
| 12614 | H | LRP6-Fc | SVSSA | 1 | SASDLYS | 491 | RYSSPI | 627 | FTTYSI | 686 | GISTSGGYTD | 745 | SGHPRYYSRRHSYGM | 818 |
| 12615 | H | LRP6-Fc | SVSSA | 1 | SASDLYS | 491 | YRYWYGPI | 628 | FAASGI | 687 | YISPSGGYTD | 746 | SYYSNYYYYYDAM | 819 |
| 12979 | 2539AM | LRP6-Fc | SVSSA | 1 | SASSLYS | 2 | YSWALF | 629 | IFFSSM | 688 | GISSYYGFTY | 747 | AHYFPWAGAL | 820 |
| 12980 | 2539AM | LRP6-Fc | SVSSA | 1 | SASSLYS | 2 | ISWGLI | 630 | IRYSSI | 689 | GIFSNYGPTT | 748 | AHYFRRARGL | 821 |
| 12981 | 2539AM | LRP6-Fc | SVSSA | 1 | SASSLYS | 2 | YFSYPI | 631 | LSYSSI | 344 | FISSYYSFTH | 749 | SHYFPWAGAM | 822 |
| 12982 | 2539AM | LRP6-Fc | SVSSA | 1 | SASSLYS | 2 | YRWALF | 632 | LAYSSI | 690 | SISSYYGFTY | 750 | AHYFPWAGGM | 823 |
| 12983 | 2539AM | LRP6-Fc | SVSSA | 1 | SASSLYS | 2 | YSRILF | 633 | LRYASM | 691 | YIASFYGDTY | 751 | SYYYPRSRGM | 824 |
| 12984 | 2539AM | LRP6-Fc | SVSSA | 1 | SASSLYS | 2 | YSLRPI | 634 | LSFSSI | 370 | HISPYYGYTH | 752 | SHYFPWAVAM | 825 |
| 12985 | 2539AM | LRP6-Fc | SVSSA | 1 | SASSLYS | 2 | YSRGLI | 635 | IFYSSI | 692 | YISSYYSYTY | 58 | SHYFPWAVAM | 825 |
| 12986 | 2539AM | LRP6-Fc | SVSSA | 1 | SASSLYS | 2 | YFWGLI | 636 | LSYSSM | 364 | NITPYYGYTS | 753 | SHYFPWFAAM | 826 |
| 12987 | 2539AM | LRP6-Fc | SVSSA | 1 | SASSLYS | 2 | YSWGLI | 637 | INYSSI | 693 | GISSYYSYTY | 754 | ANYFPWAYAM | 827 |
| 12988 | 2539AM | LRP6-Fc | SVSSA | 1 | SASSLYS | 2 | DSWGLF | 638 | ISYSSM | 358 | LITSYYGYTT | 755 | AHYFPWVVGM | 828 |
| 12989 | 2539AM | LRP6-Fc | SVSSA | 1 | SASSLYS | 2 | YYWGLI | 639 | LSYSSI | 344 | FISSYYGYTY | 73 | SHYFPWAGAL | 829 |
| 13002 | 2540AM | LRP6-Fc | SVSSA | 1 | SASSLYS | 2 | YYYLI | 640 | IAFSSI | 694 | SISSYYGYTS | 555 | SSYFPWFSAL | 830 |
| 13003 | 2540AM | LRP6-Fc | SVSSA | 1 | SASSLYS | 2 | YYILI | 641 | LFYSSM | 695 | FISPYYSFTN | 756 | SSYFPWLSDM | 831 |
| 13004 | 2540AM | LRP6-Fc | SVSSA | 1 | SASSLYS | 2 | HSFPI | 642 | ISYSSM | 358 | NITSYYGYTT | 757 | SSYFPWVSGM | 832 |
| 13005 | 2540AM | LRP6-Fc | SVSSA | 1 | SASSLYS | 2 | YHHLI | 643 | ISFASM | 696 | SISPYYSYTS | 758 | SSYFPWFSAM | 815 |
| 13006 | 2540AM | LRP6-Fc | SVSSA | 1 | SASSLYS | 2 | YYSPI | 644 | IFYSSI | 692 | SISPYYGYTD | 759 | SSYLPWFSAL | 833 |
| 13007 | 2540AM | LRP6-Fc | SVSSA | 1 | SASSLYS | 2 | YYYPI | 645 | ISFYSI | 697 | SISSYYSYTD | 760 | SSYFPWFTAL | 834 |
| 13008 | 2540AM | LRP6-Fc | SVSSA | 1 | SASSLYS | 2 | YHFLI | 646 | ISYSSI | 363 | AIYSYYSYTI | 761 | SSYFPWVGGF | 835 |
| 13009 | 2540AM | LRP6-Fc | SVSSA | 1 | SASSLYS | 2 | YYFPI | 647 | LSYSSI | 344 | SISPYYSYTS | 758 | SSRFPWFYGL | 836 |
| 13010 | 2540AM | LRP6-Fc | SVSSA | 1 | SASSLYS | 2 | YDFLI | 648 | ISYSSM | 358 | SISSYYGYTS | 555 | SSYFPWFSAL | 830 |
| 13394 | 2540AM | LRP6-Fc | SVSSA | 1 | SASSLYS | 2 | YYILI | 641 | LFYASM | 698 | SISSYYGYTS | 555 | SSYFPWFSAM | 815 |
| 13395 | 2540AM | LRP6-Fc | SVSSA | 1 | SASSLYS | 2 | YYYLI | 640 | ISYSSI | 363 | SISPYYGFTL | 762 | SSYFPWFSAM | 815 |
| 13396 | 2540AM | LRP6-Fc | SVSSA | 1 | SASSLYS | 2 | YYFPI | 647 | IAYASI | 699 | SISSYYSYTY | 763 | SSYFPWFSAM | 815 |
| 13397 | 2540AM | LRP6-Fc | SVSSA | 1 | SASSLYS | 2 | YYFPI | 647 | ITYSSI | 361 | SISSYYGYTA | 764 | SSYFPWSSAM | 837 |
| 13398 | 2540AM | LRP6-Fc | SVSSA | 1 | SASSLYS | 2 | NSFLI | 649 | ISRSSI | 700 | GISSYYGYTR | 765 | SHYFPWLSAL | 838 |
| 13399 | 2540AM | LRP6-Fc | SVSSA | 1 | SASSLYS | 2 | YYNPI | 650 | ISYASI | 701 | SISPYYGYTR | 766 | ASYYPWFSAM | 839 |
| 13400 | 2540AM | LRP6-Fc | SVSSA | 1 | SASSLYS | 2 | YGFLI | 651 | LDYSSI | 702 | SISPYYSYTT | 767 | SSYIPWRYAI | 840 |
| 13401 | 2540AM | LRP6-Fc | SVSSA | 1 | SASSLYS | 2 | YYFLI | 624 | ISYSSI | 363 | SISPYYSYTN | 74 | SSYFPWISAM | 841 |
| 13402 | 2540AM | LRP6-Fc | SVSSA | 1 | SASSLYS | 2 | YYFPI | 647 | IYYYSM | 530 | GISSYYSYTS | 768 | SSYFPWISAL | 842 |
| 13403 | 2540AM | LRP6-Fc | SVSSA | 1 | SASSLYS | 2 | YYFPI | 647 | ISYSSM | 358 | SISPYYSFTS | 769 | SSRFPWISGM | 843 |
| 13404 | 2540AM | LRP6-Fc | SVSSA | 1 | SASSLYS | 2 | YNFLI | 652 | ISYSSI | 363 | SISSYYGFTS | 68 | SSYFPWFSAL | 830 |
| 13405 | 2540AM | LRP6-Fc | SVSSA | 1 | SASSLYS | 2 | YYFPI | 647 | ISYSSI | 363 | SISSYYGFTS | 68 | SPYFPWSSAL | 844 |
| 13406 | 2540AM | LRP6-Fc | SVSSA | 1 | SASSLYS | 2 | YYFPI | 647 | LSYSAI | 703 | YISPYYGYTY | 65 | ASYLPWFSAM | 845 |
| 13407 | 2540AM | LRP6-Fc | SVSSA | 1 | SASSLYS | 2 | SSFLI | 653 | LSGFGI | 704 | FISSYYGYTA | 770 | SSYLPWITAM | 846 |
| 13408 | 2540AM | LRP6-Fc | SVSSA | 1 | SASSLYS | 2 | YVFLI | 654 | LSFASM | 705 | SISSYYGYTP | 771 | SAYFPWFAAL | 847 |
| 13409 | 2540AM | LRP6-Fc | SVSSA | 1 | SASSLYS | 2 | YYFPI | 647 | LAYNSI | 706 | SIFSYYSYTN | 772 | SSYFPWFSAM | 815 |
| 13410 | 2540AM | LRP6-Fc | SVSSA | 1 | SASSLYS | 2 | FYGPI | 655 | ISFSSI | 357 | SISSYYGYTL | 773 | SSYFPWFFAM | 848 |
| 13411 | 2540AM | LRP6-Fc | SVSSA | 1 | SASSLYS | 2 | YFFLI | 656 | LYYSNI | 707 | YISSYYGYTS | 774 | SSYFPWFSAL | 830 |
| 13412 | 2540AM | LRP6-Fc | SVSSA | 1 | SASSLYS | 2 | YYGPI | 657 | IHYYSI | 708 | SISPYYSFTD | 775 | SSYFPWFSAM | 815 |
| 13413 | 2540AM | LRP6-Fc | SVSSA | 1 | SASSLYS | 2 | YDFLI | 648 | ISFASI | 709 | SIYSYYSFTN | 776 | SSHFPWVSAL | 849 |
| 13414 | 2540AM | LRP6-Fc | SVSSA | 1 | SASSLYS | 2 | YYSPI | 644 | IYYSSM | 378 | SISPYYGYTS | 557 | SSYFPWVSAM | 850 |
| 13415 | 2540AM | LRP6-Fc | SVSSA | 1 | SASSLYS | 2 | YYFLI | 624 | LSYFSM | 710 | SIYSYYGFTN | 777 | SSHFPWFSAM | 851 |
| 13422 | 2540AM | LRP6-Fc | SVSSA | 1 | SASSLYS | 2 | FYGPI | 655 | LFYSSM | 695 | TISPYYGYTS | 778 | SSYFPWFSAL | 830 |
| 13428 | 2540AM | LRP6-Fc | SVSSA | 1 | SASSLYS | 2 | YTLPI | 658 | ISFSSM | 380 | HISSYYGFTS | 779 | SSYFPWFSAL | 830 |
| 13430 | 2540AM | LRP6-Fc | SVSSA | 1 | SASSLYS | 2 | YRFPI | 659 | ISYFSI | 711 | SISPYYSYTN | 74 | SSYFPWFSAI | 852 |
| 13431 | 2540AM | LRP6-Fc | SVSSA | 1 | SASSLYS | 2 | YHLLI | 660 | LYYNSI | 712 | AIHPYYGYTS | 780 | SSRFPWFPAM | 853 |
| 13432 | 2540AM | LRP6-Fc | SVSSA | 1 | SASSLYS | 2 | YSFPI | 661 | LSYASI | 713 | SISSYYGYTG | 781 | SSYFPWFSAM | 815 |
| 13435 | 2540AM | LRP6-Fc | SVSSA | 1 | SASSLYS | 2 | YFLPI | 662 | LSYSSM | 364 | SISPYYGFTY | 782 | SSYFPWFSAL | 830 |
| 13436 | 2540AM | LRP6-Fc | SVSSA | 1 | SASSLYS | 2 | YYFPI | 647 | ISYASM | 714 | SISSYYGYTD | 783 | SSYVPWFYAL | 854 |
| 13437 | 2540AM | LRP6-Fc | SVSSA | 1 | SASSLYS | 2 | YDNLI | 663 | ITYSSI | 361 | SISSYYGFTS | 68 | SSYFPWFSAM | 815 |
| 13438 | 2540AM | LRP6-Fc | SVSSA | 1 | SASSLYS | 2 | YLFPI | 664 | ISYYSI | 715 | SIYSYYGYTT | 784 | ASYFPWFPAM | 855 |
| 13439 | 2540AM | LRP6-Fc | SVSSA | 1 | SASSLYS | 2 | YFFPI | 665 | LSHSSI | 716 | SISSHYGYTH | 785 | SSYFPWFFAL | 856 |
| 13440 | 2540AM | LRP6-Fc | SVSSA | 1 | SASSLYS | 2 | YYIPI | 666 | IAYNSM | 717 | SISSYYSYTD | 760 | SSYFPWFSAL | 830 |
| 13441 | 2540AM | LRP6-Fc | SVSSA | 1 | SASSLYS | 2 | FNFLI | 667 | LSYSSI | 344 | YISSYYGYTA | 786 | SSYYPWFSAL | 857 |
| 13442 | 2540AM | LRP6-Fc | SVSSA | 1 | SASSLYS | 2 | YNYLI | 668 | LAYSSI | 690 | SISSYYGYTY | 787 | SSYLPWVSAL | 858 |
| 12990 | 2542AM | LRP6-Fc | SVSSA | 1 | SASSLYS | 2 | YYWPI | 623 | ISLFFM | 718 | SIYSSYSYTS | 788 | SFNGAKKPYFSGWAM | 859 |
| 12991 | 2542AM | LRP6-Fc | SVSSA | 1 | SASSLYS | 2 | YYWPI | 623 | IPSYFM | 719 | SIYSSYSYTA | 789 | NVVVSRKPYFFRSAM | 860 |
| 12992 | 2542AM | LRP6-Fc | SVSSA | 1 | SASSLYS | 2 | YYWPI | 623 | ISSSYM | 348 | SIYSSYSYTG | 790 | TVPGSKRPYFASLAI | 861 |
| 12993 | 2542AM | LRP6-Fc | SVSSA | 1 | SASSLYS | 2 | YYWPI | 623 | ISSYFI | 720 | SIYPSYSYTS | 791 | NVRGFRKPYFSRWAM | 862 |
| 12994 | 2542AM | LRP6-Fc | SVSSA | 1 | SASSLYS | 2 | YYWPI | 623 | LSSYYM | 721 | SIYSRFSYTA | 792 | NVPGIKRPYFTAWAM | 863 |
| 12995 | 2542AM | LRP6-Fc | SVSSA | 1 | SASSLYS | 2 | SYWPI | 669 | LHSYYI | 722 | NIYSSYGYTS | 793 | TIRGSKRPYFAASGL | 864 |
| 12996 | 2542AM | LRP6-Fc | SVSSA | 1 | SASSLYS | 2 | YYWPI | 623 | LSSYYM | 721 | SIYSSYSYTS | 788 | TARENKKPYFSGWAM | 865 |
| 12997 | 2542AM | LRP6-Fc | SVSSA | 1 | SASSLYS | 2 | YYRPI | 670 | IGSYYM | 723 | AIYSPYGYTS | 794 | TLPLSKKPYFSLWAF | 866 |
| 12998 | 2542AM | LRP6-Fc | SVSSA | 1 | SASSLYS | 2 | YYWPI | 623 | LGSYYI | 724 | TIYSYYSYTS | 795 | TFHGSKKPYFSGRAM | 867 |
| 12999 | 2542AM | LRP6-Fc | SVSSA | 1 | SASSLYS | 2 | YYWPI | 623 | LTSYYI | 725 | SIYPSYSYTS | 791 | SIRGSKKPYFSRLAL | 868 |
| 13000 | 2542AM | LRP6-Fc | SVSSA | 1 | SASSLYS | 2 | YYWPI | 623 | ISTYYM | 726 | SIYPSYSYTS | 791 | SVRGSKKPYFSHWAM | 869 |
| 13001 | 2542AM | LRP6-Fc | SVSSA | 1 | SASSLYS | 2 | YYWPI | 623 | ISSNYI | 548 | SIYSSFGYTS | 796 | NVRTSKKPYFPLWAM | 870 |
| 13011 | 2460AM | LRP6-Fc | SVSSA | 1 | SASSLYS | 2 | ASNNLI | 671 | IPLYTI | 727 | SISPSYSYTY | 797 | GVSGGSNYISIFRNSSGM | 871 |
| 13012 | 2460AM | LRP6-Fc | SVSSA | 1 | SASSLYS | 2 | SSYSLI | 130 | IFSTSI | 728 | SITSAYSYTY | 798 | GGLSVSHYNYVHSFKWG | 872 |
| | | | | | | | | | | | | | L | |
| 13013 | 2460AM | LRP6-Fc | SVSSA | 1 | SASSLYS | 2 | SAITPI | 672 | ISYSTM | 729 | SIVSSYSRTY | 799 | SCSSFCNYVSNYNARRA | 873 |
| | | | | | | | | | | | | | L | |
| 13014 | 2460AM | LRP6-Fc | SVSSA | 1 | SASSLYS | 2 | FSYSPF | 673 | LSSSGM | 730 | AIYPFDGYTY | 800 | GNARVSNYISSYYAWRA | 874 |
| | | | | | | | | | | | | | M | |
| 13015 | 2460AM | LRP6-Fc | SVSSA | 1 | SASSLYS | 2 | SSYNLI | 674 | FSSSSI | 528 | GIFSYFSYTY | 801 | GGYGFSYYNSVTFYRWA | 875 |
| | | | | | | | | | | | | | F | |
| 13016 | 2460AM | LRP6-Fc | SVSSA | 1 | SASSLYS | 2 | SYNFPF | 675 | IRGPSI | 731 | SISPFCGFTY | 802 | VGSGVCNSLHNYFYKRG | 876 |
| | | | | | | | | | | | | | M | |
| 13017 | 2460AM | LRP6-Fc | SVSSA | 1 | SASSLYS | 2 | SSTVPF | 676 | FSSTYM | 732 | SITPSYGYTN | 803 | SSSDISIDNSIRYTWGAM | 877 |
| 13018 | 2460AM | LRP6-Fc | SVSSA | 1 | SASSLYS | 2 | SSYSLI | 130 | INSSFM | 733 | SISPSYGYTY | 804 | GHSGVTNFISFYYRRRA | 878 |
| | | | | | | | | | | | | | M | |
| 13019 | 2460AM | LRP6-Fc | SVSSA | 1 | SASSLYS | 2 | SNYSLF | 677 | IFGYSM | 734 | SIFPCCSNTY | 805 | GVSGLDNNRTASYSRMG | 879 |
| | | | | | | | | | | | | | M | |
| 13020 | 2460AM | LRP6-Fc | SVSSA | 1 | SASSLYS | 2 | STYSLI | 678 | FSSSTI | 735 | SIAPSFGHTY | 806 | GAASVNHIGSLYVSWRG | 880 |
| | | | | | | | | | | | | | L | |
| 13021 | 2460AM | LRP6-Fc | SVSSA | 1 | SASSLYS | 2 | SAFSLI | 679 | LSSSTM | 736 | SISPYYSYTR | 807 | HGSGLSHNATTSYYRSAI | 881 |
| 13022 | 2460AM | LRP6-Fc | SVSSA | 1 | SASSLYS | 2 | SSYSLI | 130 | ISYTSI | 737 | SIFSTYSYTY | 808 | SSSAVSRNSIVYYSRTAM | 882 |
| 13023 | 2460AM | LRP6-Fc | SVSSA | 1 | SASSLYS | 2 | SSYTPI | 680 | FSSSVM | 738 | SIAPSYSFTY | 809 | GVCRVSNYSSYFYSRGA | 883 |
| | | | | | | | | | | | | | M | |
| 13024 | 2460AM | LRP6-Fc | SVSSA | 1 | SASSLYS | 2 | YSNSLI | 681 | ISYSTM | 729 | SITPYYSTTS | 810 | AISHVAHYDNVIYSKWGI | 884 |
| 13025 | 2460AM | LRP6-Fc | SVSSA | 1 | SASSLYS | 2 | SSYSLI | 130 | IASYSM | 739 | FISPYHSYTD | 811 | GHSVLSNYVSIHYYWAG | 885 |
| | | | | | | | | | | | | | F | |
| 13026 | 8716 AM | LRP6-Fc | SVSSA | 1 | SASSLYS | 2 | YWAYFSPI | 682 | FSYSSM | 740 | SISSRYGYTY | 812 | SWAM | 586 |

### Example 3: Tetravalent Binding Antibody Molecule Formats

[0192] A. We generated various formats of tetravalent binding antibody molecules comprising pan-FZD and LRP5/6 antibody fragments, e.g., scFv, diabodies and Fab, on either end of an Fc domain, see Table 5 and FIG. 6, and assayed their Wnt agonist activity. DNA fragments encoding antibody variable domains were either amplified by PCR from phagemid DNA template or were constructed by chemical synthesis (Twist Biosciences). The DNA fragments were cloned into mammalian expression vectors (pSCSTa). Bispecific diabodies and IgGs contained an optimized version of a “knobs-in-holes” heterodimeric Fc (Ridgway et al. Protein Eng. 9, 617-621 (1996)). Diabody domains were arranged in a VH-VL orientation with the variable domains separated by a short GGGGS linker (SEQ ID NO: 886), which favors intermolecular association between VH and VL domains and thus favors diabody formation. To produce diabody fusion constructs, the diabody chains were fused to human IgG1 Fc. Diabody-fc-diabody proteins were constructed as VH-x-VL-y-[human IgG1 Fc]-z-VH-x-VL where linkers are x=GGGGS (SEQ ID NO: 886), y=LEDKTHTKVEPKSS (SEQ ID NO: 887), and z=SGSETPGTSESATPESGGG (SEQ ID NO: 888). In this format, the human IgG1 Fc or knob-in-hole IgG1 Fc fragments spanned from position 234-478 (Kabat numbering). For scFv-Fc fusions, the variable domains were arranged in a VL-VH orientation and were connected by a long GTTAASGSSGGSSSGA linker (SEQ ID NO: 889), which favors intramolecular association between VH and VL domains and thus favors scFv formation. Variants with a Fab domain fused to the C-terminus of the Fc were generated via chemical synthesis (Twist Biosciences). For all constructs, the entire coding region was cloned into a mammalian expression vector in frame with the secretion signal peptide.

[0193] These various of tetravalent binding antibody molecules comprising pan-specific FZD and LRP5/6 antibody fragments were tested in a TOPFLASH assay to monitor beta catenin-mediated gene reporter activity. Proteins were compared against the native ligand Wnt3a. Assays were performed by plating TOPFLASH cells to ˜70% confluency in a 96-well tissue culture treated plate. Agonists were diluted in DMEM to provide a final assay concentration of 0.046 nM-100 nM and cells were treated overnight at 37° C. under 5% CO₂. Luciferase expression was quantified using the Dual-Luciferase Reporter Assay System (Promega) in 96-well black plates in accordance with the manufacturer's instructions. Briefly, HEK293T cells were transduced with lentivirus coding for the pBARls reporter (Biechele and Moon in Wnt Signaling: Pathway Methods and Mammalian Models, E. Vincan, Ed. (Humana Press, Totowa, N.J., 2008), pp. 99-110) and with Renilla Luciferase as a control to generate a Wnt-βcatenin signaling reporter cell line. 1-2×10³ cells in 120 μl were seeded in each well of 96-well plates for 24 hours prior to transfection or stimulation. The following day, FZD Agonists or Ab protein was added, and following 15-20 hours of stimulation, cells were lysed and luminescence was measured in accordance with the dual luciferase protocol (Promega) using an Envision plate reader (PerkinElmer). For the FZD4 Agonist assay, FZD4 cDNA was transfected for 6 hours prior to adding the FZD Agonist. For the Wnt inhibition assays, Wnt1 was introduced by cDNA transfection or WNT3A protein was applied for 6 hours prior to the addition of Ab protein. All assays were repeated at least three times. The results are presented in Table 5. As shown in Table 5, each of the tetravalent formats activate FZD signaling to differing degrees when clustering FZD4 and LRP5. These formats were also evaluated for stability, homogeneity and yield production from Expi293 (FIGS. 3 and 9). From these analyses, the Diabody-Fc-Fab format provides the best balance of activity, expression, stability. Finally, we applied the same modality arrangement for FZDS and LRP6 and we observed potent agonist activity. The results in Table 5 show that the various tetravalent modalities elicit WNT agonism and that engagement of 2 LRP5/6 epitopes produces WNT signaling activity (maxima) higher than with 1 LRP5/6 epitope.

TABLE 5

| | | | | TOPFLASH | | | |
|---|---|---|---|---|---|---|---|
| | | | Binding specificity | EC50 (nM) | | % Wnt Maxima | |
| Molecule | Modality | Paratopes | (Paratope Stoichiometry) | Avg Stdev | | Avg | Stdev |
| Wnt3a | Recombinantly produced ligand | NA | FZD/LRP | 6 | 3 | 100% | ND |
| CM0011 | FZD Diabody-Fc-LRP Diabody | 5019 (FZD Diabody); | FZD1/2/4/5/7/8, | 0.3 | 0.1 | 63% | 10% |
| | | 2539, 2542 (LRP diabody) | LRP6¹, LRP6³ (2:1:1) | | | | |
| ANT-4 | FZD Diabody-Fc-LRP Fab | 5016(FZD Diabody); | FZD1/2/4/5/7/8, | 0.5 | 0.1 | 63% | 6% |
| | | 2540, 2542 (LRP Fab) | LRP6¹, LRP6³ (2:1:1) | | | | |
| ANT-5 | FZD Diabody-Fc-LRP Fab | 5016(FZD Diabody); | FZD1/2/4/5/7/8, | 0.5 | 0.1 | 59% | 8% |
| | | 2540, 2542 (LRP Fab) | LRP6¹, LRP6³ (2:1:1) | | | | |
| CT0001 | FZD IgG-LRP Diabody | 5016(FZD IgG); | FZD1/2/4/5/7/8, | 0.3 | 0.1 | 57% | 17% |
| | | 2539, 2542 (LRP Diabody) | LRP6¹, LRP6³ (2:1:1) | | | | |
| CT0002 | LRP Diabody-Fc-FZD scFv (VL-VH) | 2539, 2542 (LRP Diabody); | FZD1/2/4/5/7/8, | 0.5 | 0.1 | 55% | 22% |
| | | 5016 (FZD scFv) | LRP6¹, LRP6³ (2:1:1) | | | | |
| CM0126 | FZD Diabody-Fc-LRP Diabody | 5016 (FZD Diabody); | FZD1/2/4/5/7/8, | 0.3 | 0.2 | 52% | 1% |
| | | 2539, 2542 (LRP Diabody) | LRP6¹, LRP6³ (2:1:1) | | | | |
| ANT-1 | LRP Diabody-Fc-FZD Fab | 2540, 2542 (LRP Diabody); | FZD1/2/4/5/7/8, | 0.7 | 0.5 | 49% | 22% |
| | | 5016 (FZD Fab) | LRP6¹, LRP6³ (2:1:1) | | | | |
| CT0003 | FZD Diabody-Fc-LRP scFv | 5016 (FZD Diabody); | FZD1/2/4/5/7/8, | 0.4 | 0.1 | 42% | 16% |
| | | 2539, 2542 (LRP scFv) | LRP6¹, LRP6³ (2:1:1) | | | | |
| ANT-2 | LRP Diabody-Fc-FZD Fab | 2540, 2542(LRP Diabody); | FZD1/2/4/5/7/8, | 0.3 | 0.1 | 38% | 25% |
| | | 5016(FZD Fab) | LRP6¹, LRP6³ (2:1:1) | | | | |
| CM0042 | FZD Diabody-Fc-LRP Diabody | 5019(FZD Diabody); | FZD1/2/4/5/7/8, | 0.9 | 0.8 | 33% | 22% |
| | | 2539 (LRP Diabody) | LRP6³ (2:2) | | | | |
| CM0302 | FZD IgG-LRP Diabody | 5056(FZD IgG)- | FZD1/2/4/5/7/8/10, | 0.3 | 0.2 | 18% | 8% |
| | | 2539(LRP Diabody) | LRP6³ (2:2) | | | | |
| CM0303 | FZD IgG-LRP scFv | 5056(FZD IgG); | FZD1/2/4/5/7/8/10, | 3.7 | 2.1 | 17% | 13% |
| | | 2539(LRP scFv) | LRP6³ (2:2) | | | | |
| CM0299 | FZD IgG-LRP Diabody | 5016(FZD IgG)-, | FZD1/2/4/5/7/8, | 0.1 | 0.1 | 14% | 5% |
| | | 2539(LRP Diabody) | LRP6³ (2:2) | | | | |

| | | | | TOPFLASH | | | |
|---|---|---|---|---|---|---|---|
| | | | Binding specificity | EC₅₀ (nM) | | % Wnt Maxima | |
| Molecule | Modality | Paratopes | (Paratope Stoichiometry) | Avg Stdev | | Avg | Stdev |
| Wnt3a | Recombinantly produced ligand | NA | FZD/LRP | 6 | 3 | 100% | ND |
| CM0300 | FZD IgG-LRP scFv | 5016(FZD IgG)-, | FZD1/2/4/5/7/8, | 0.3 | 0.2 | 5% | 2% |
| | | 2539(LRP scFv ) | LRP6³ (2:2) | | | | |
| CM0301 | FZD IgG-LRP scFv | 5016(FZD IgG)-, | FZD1/2/4/5/7/8, | 0.2 | 0.2 | 1% | 1% |
| | | 2542(LRP scFv ) | LRP6¹ (2:2) | | | | |
| CM0156 | Diabody-Fc-Diabody | 4275 | no FZD/LRP binding | NA | NA | NA | NA |
| 4275 | IgG | 4275 | no FZD/LRP binding | NA | NA | NA | NA |

[0194] B. Diabody-Fc-Fab format FZD4 Agonists.

[0195] FZD Agonists having a bispecific LRP5-binding diabody and a FZD4 binding domain comprising FZD4-binding Fabs (FZD4 Agonists), a FZD5 binding domain comprising FZD5-binding Fabs (FZD5 Agonists), or a FZD binding domain that binds multiple FZD (pan-FZD Agonist) were generated using a knob-in-holes system. Briefly, the constructs were generated by chemical synthesis (Twist Biosciences) or by standard molecular biology techniques in a mammalian expression vector (pSCSTa). Diabody constructs were arranged in a VH-VL manner with a short (GGGGS (SEQ ID NO: 886)) linker linking the VH and VL to favor intermolecular pairing. For bispecific diabody arrangements, the variable domains for paratopes A and B, respectively, were arranged as VH(A)-VL(B) on the Hole Fc chain and VH(B)-VL(A) on the Knob Fc chain to facilitate proper paratope formation. Diabodies were fused to the N-terminus of an optimized knob-in-holes heterodimeric Fc (Ridgway et al. Protein Eng. 9, 617-621 (1996) via a GGGGSGGGGSEPKSS linker (SEQ ID NO: 890). The Fc region also contains the effector-null mutations D278A and N314G (Kabat numbering), corresponding to D655A/N297G (EU numbering). Fab domains were fused to the C-terminus of the heterodimeric Fc via a GGGSGGGSGGGSGGGSGSTG linker (SEQ ID NO: 891). Directly to this linker was fused the N-terminus of the Fab VH domain followed by CH1, terminating at T238 (Kabat numbering). This Fab pairs with a standard kappa light chain which was cloned as described above. For all constructs, the entire coding region was cloned into a mammalian expression vector in frame with the secretion signal peptide.

[0196] In addition, Diabody-fc-Fab formats were constructed as VH-x-VL-y-[human IgG1 Fc]-z-VH where linkers are x=GGGGS (SEQ ID NO: 886), y=GGGGSGGGGSEPKSSDKTHT (SEQ ID NO: 892), and z=GGGSGGGSGGGSGGGSGSTG (SEQ ID NO: 891). Diabody domains were arranged in a VH-VL orientation with the variable domains separated by a short GGGGS linker (SEQ ID NO: 886), which favors intermolecular association between VH and VL domains and thus favors diabody formation. Further, the Fc region may exhibit attenuated effector functions due amino acid mutations to N297G and D265A (DANG) variants or L234A, L235A, P331S (LALAPS) variants, and with the Fc region further comprising knob-in-hole heterodimerization variants Merrimack, Merchant or Merchant S:S.

[0197] FIG. 7 is an illustration of the Diabody-Fc-Fab format FZD4 Agonists having a LRP5 binding domain comprised of a diabody that is bivalent and bispecific for LRP5 and a FZD4 binding domain comprised of two FZD4 binding Fab fragments formed by a VL and CL1 of the light chain construct pairing with the VH and CH1 of each of the heavy chain hole and heavy chain knob constructs. Table 18 presents the amino acid sequences of heavy chains and light chains of FZD4 Agonists ANT's (Diabody-Fc-Fab format): the heavy chain knob construct (ANT16 knob), the heavy chain hole construct (ANT hole) and the light chain construct. The light chain and heavy chain variable CDRs are in bold underlined italics. FIG. 16A depicts Diabody-Fc-Fab format FZD4 Agonists having Fc regions with attenuated effector functions due to amino acid mutations, e.g., N297G (NG) and D265A, (DANG) variants, and/or LALAPS variants, and with the Fc region further comprising knob-in-hole heterodimerization variants Merrimack, Merchant or Merchant S:S

[0198] B. IgG-Diabody Format FZD4 Agonists.

[0199] FZD Agonists having two FZD-binding Fabs forming an N-terminal binding domain and a bispecific LRP5/6 binding diabody forming the C-terminal binding domain and an Fc domain were generated using a knob-in-holes system. IgG-Diabody proteins were constructed as VH-[human IgG1 Fc]-y-VH-x-VL where linkers are x=GGGGS (SEQ ID NO: 886) and y=GGGSGGGSGGGSGGGSGSTG (SEQ ID NO: 891).

[0200] FIG. 15 presents an illustration of the IgG-Diabody format FZD4 Agonists having an FZD binding domain comprising two Fab fragments attached to the N-terminus of the Fc domain with each Fab binding an FZD. The LRP5/6 co-receptor binding domain is attached to the C-terminus of the Fc domain and is composed of a diabody that binds two different sites on the co-receptor, e.g., a Wnt1 site (E1-E2) and a Wnt3 site (E3-E4) on LRP5/6. The Fabs may be specific for a particular FZD, e.g. FZD4, or may be pan-specific, binding to more than one FZD, e.g., to FZD4 and one or more other FZD.

[0201] FIG. 16B depicts IgG-Diabody FZD4 Agonists having Fc regions with attenuated effector functions due to amino acid mutations, e.g., N297G (NG) and D265A, (DANG) variants, and/or LALAPS variants, and with the Fc region further comprising knob-in-hole heterodimerization variants Merrimack, Merchant or Merchant S:S. Table 19 presents the amino acid sequences of heavy chains and light chains of FZD4 Agonist, ANT39 (Diabody-Fc-Fab format) and ANT39wi (IgG-Diabody format): the heavy chain knob construct (ANT39 and ANT39i knob), the heavy chain hole construct (ANT39 and ANT39i hole) and the light chain construct. Also included in Table 19 are amino acid sequences of heavy chains and light chains of FZD4 Agonist, ANT39 and ANT39i variants DANG, LALAPS, LALAPS Merchant and LALAPS Merchant S-S. The light chain and heavy chain variable CDRs are in bold underlined italics.

TABLE 6A

| | LRP5 Diabody Site 1 | | | | | | LRP5 Diabody Site 2 | | | | |
|---|---|---|---|---|---|---|---|---|---|---|---|
| | | | SEQ | | SEQ | | SEQ | | SEQ | | SEQ |
| | | [2] | ID | [3] | ID | [4] | ID | [5] | ID | [6] | ID |
| Molecule | [1] | CDR-H1 | NO | CDR-H2 | NO | CDR-H3 | NO | CDR-L2 | NO | CDR-L3 | NO |
| ANT16-Hole | D | FSSSSI | 528 | SISSSYGYTY | 553 | SWAM | 586 | SASDLYS | 491 | YAGAGLI | 510 |
| ANT16-Knob | D | FTAYAM | 536 | SIYPSGGYTA | 566 | RSYYFAL | 603 | SASSLYS | 2 | YWAYYSPI | 493 |
| ANT18-Hole | N | LSYYYM | 527 | SIYSSYGYTY | 552 | WSHVSGHYSGM | 584 | SASSLYS | 2 | SSYSLI | 130 |
| ANT18-Knob | N | FSSSSI | 528 | SISSSYGYTY | 553 | GGSGVSHYGSVYYSWWAL | 585 | SASSLYS | 2 | ASYAPI | 492 |
| ANT20-Hole | N | LSYYYM | 527 | SIYSSYGYTY | 552 | WSHVSGHYSGM | 584 | SASDLYS | 491 | YAGAGLI | 510 |
| ANT20-Knob | D | FTAYAM | 536 | SIYPSGGYTA | 566 | RSYYFAL | 603 | SASSLYS | 2 | ASYAPI | 492 |
| ANT21-Hole | N | FSSSSI | 528 | SISSSYGYTY | 553 | SWAM | 586 | SASSLYS | 2 | SSYSLI | 130 |
| ANT21-Knob | N | FSSSSI | 528 | SISSSYGYTY | 553 | GGSGVSHYGSVYYSWWAL | 585 | SASSLYS | 2 | YWAYYSPI | 493 |
| ANT36-Hole | N | LSYYYM | 527 | SIYSSYGYTY | 552 | WSHVSGHYSGM | 584 | SASSLYS | 2 | SSYSLI | 130 |
| ANT36-Knob | N | FSSSSI | 528 | SISSSYGYTY | 553 | GGSGVSHYGSVYYSWWAL | 585 | SASSLYS | 2 | ASYAPI | 492 |
| ANT39-Hole | D | FSSSSI | 528 | SISSSYGYTY | 553 | SWAM | 586 | SASDLYS | 491 | YAGAGLI | 510 |
| ANT39-Knob | D | FTAYAM | 536 | SIYPSGGYTA | 566 | RSYYFAL | 603 | SASSLYS | 2 | YWAYYSPI | 493 |
| ANT42-Hole | D | FSSSSI | 528 | SISSSYGYTY | 553 | SWAM | 586 | SASDLYS | 491 | YAGAGLI | 510 |
| ANT42-Knob | D | FTAYAM | 536 | SIYPSGGYTA | 566 | RSYYFAL | 603 | SASSLYS | 2 | YWAYYSPI | 493 |

In all the molecules the LRP5 Diabody site 2 CDR-L1 is SVSSA (SEQ ID NO: 1)

TABLE 6B

| | | FZD4 FAb | | | | | | | |
|---|---|---|---|---|---|---|---|---|---|
| | | | SEQ | | SEQ | | SEQ | | SEQ |
| | | [8] | ID | [9] | ID | [10] | ID | [11] | ID |
| Molecule | [7] | CDR-H1 | NO: | CDR-H2 | NO: | CDR-H3 | NO: | CDR-L3 | NO: |
| ANT16-Hole | T | LSSYSM | 24 | YISSYYGYTY | 51 | PAPGHWGF | 79 | WYYAPI | 3 |
| ANT16-Knob | T | LSSYSM | 24 | YISSYYGYTY | 51 | PAPGHWGF | 79 | WYYAPI | 3 |
| ANT18-Hole | T | LSSYSM | 24 | YISSYYGYTY | 51 | PAPGHWGF | 79 | WYYAPI | 3 |
| ANT18-Knob | T | LSSYSM | 24 | YISSYYGYTY | 51 | PAPGHWGF | 79 | WYYAPI | 3 |
| ANT20-Hole | T | LSSYSM | 24 | YISSYYGYTY | 51 | PAPGHWGF | 79 | WYYAPI | 3 |
| ANT20-Knob | T | LSSYSM | 24 | YISSYYGYTY | 51 | PAPGHWGF | 79 | WYYAPI | 3 |
| ANT21-Hole | T | LSSYSM | 24 | YISSYYGYTY | 51 | PAPGHWGF | 79 | WYYAPI | 3 |
| ANT21-Knob | T | LSSYSM | 24 | YISSYYGYTY | 51 | PAPGHWGF | 79 | WYYAPI | 3 |
| ANT36-Hole | T | LSSYSM | 24 | YISSYDSITD | 61 | PAVGHMAF | 90 | WYNAPI | 12 |
| ANT36-Knob | T | LSSYSM | 24 | YISSYDSITD | 61 | PAVGHMAF | 90 | WYNAPI | 12 |
| ANT39-Hole | T | LSSYSM | 24 | YISSYDSITD | 61 | PAVGHMAF | 90 | WYNAPI | 12 |
| ANT39-Knob | T | LSSYSM | 24 | YISSYDSITD | 61 | PAVGHMAF | 90 | WYNAPI | 12 |
| ANT42-Hole | T | SDFYFI | 164 | TIYPFIGNTY | 194 | AFPGSYHPF | 220 | STGSLI | 135 |
| ANT42-Knob | T | SDFYFI | 164 | TIYPFIGNTY | 194 | AFPGSYHPF | 220 | STGSLI | 135 |

In all the molecules the FZD FAB CDR-L1 and CDR-L2 are respectively SVSSA (SEQ ID NO: 1) and SASSLYS (SEQ ID NO: 2)

TABLE 6C

| | LRP6 Diabody Site 1 | | | | | | LRP6 Diabody Site 2 | | | | |
|---|---|---|---|---|---|---|---|---|---|---|---|
| | | | SEQ | | SEQ | | SEQ | | SEQ | | SEQ |
| | | [2] | ID | [3] | ID | [4] | ID | [5] | ID | [6] | ID |
| Molecule | [1] | CDR-H1 | NO | CDR-H2 | NO | CDR-H3 | NO | CDR-L2 | NO | CDR-L3 | NO |
| ANT59-Hole | D | ISSYFI | 720 | SIYPSYSYTS | 791 | NVRGFRKPYFSRWAM | 862 | SASSLYS | 2 | YFFPI | 665 |
| ANT59-Knob | D | LSHSSI | 716 | SISSHYGYTH | 785 | SSYFPWFFAL | 856 | SASSLYS | 2 | YYWPI | 623 |
| ANT9-Hole | D | ISSYFI | 720 | SIYPSYSYTS | 791 | NVRGFRKPYFSRWAM | 862 | SASSLYS | 2 | YFFPI | 665 |
| ANT9-Knob | D | LSHSSI | 716 | SISSHYGYTH | 785 | SSYFPWFFAL | 856 | SASSLYS | 2 | YYWPI | 623 |

In all the molecules the CDR-L1 of all LRP abs are SVSSA (SEQ ID NO: 1)

TABLE 6D

| | FZD Paratope | | | | | | | | | |
|---|---|---|---|---|---|---|---|---|---|---|
| | | | | SEQ | | SEQ | | SEQ | | SEQ |
| | FZD | | H1 (8) | ID | H2 (9) | ID | H3 (10) | ID | L3 (11) | ID |
| Molecule | Specificity | 7 | CDR-H1 | NO | CDR-H2 | NO | CDR-H3 | NO | CDR-L3 | NO |
| ANT59-Hole | 5 | N | IAYSSM | 365 | TIYPSYSSTY | 462 | YYAM | 484 | AHYFPI | 285 |
| ANT59-Knob | 5 | N | IAYSSM | 365 | TIYPSYSSTY | 462 | YYAM | 484 | AHYFPI | 285 |
| ANT9-Hole | 1, 2, 4, | N | IHSSSI | 893 | ATYSSFGSIT | 894 | YHHPFGYAL | 895 | GVYLF | 896 |
| | 5, 7, 8 | | | | | | | | | |
| ANT9-Knob | 1, 2, 4, | N | IHSSSI | 893 | ATYSSFGSIT | 894 | YHHPFGYAL | 895 | GVYLF | 896 |
| | 5, 7, 8 | | | | | | | | | |

In all molecules the CDR-L1 for FZD FAB are SVSSA (SEQ ID NO: 1) and CDR-L2 are SASSLYS (SEQ ID NO: 2)

[0202] C. FZD Agonists are Highly Specific for FZD4, Bind with High Specificity and are Stable in Solution.

[0203] Using biolayer interferometry (BLI) we have found that FZD4 Agonists described herein are highly specific for FZD4 over other FZD receptors. Recombinant FZD ECD proteins were immobilized on BLI sensors. The FZD4 Agonists in the Diabody-Fc-Fab format, having a LRP5 binding domain comprised of a diabody that is bivalent and bispecific for LRP5 and a FZD4 binding domain comprised of two FZD4 binding Fab fragments, were tested at a concentration of 100 nM in a buffer of PBS+0.05% Tween-20 and 1% BSA for binding to the ECD proteins. The results are presented in FIG. 8A. Controls in the assay included CM0199, a diabody-Fc-diabody format FZD agonist that recognizes FZD4 and LRP5 and Immunoglobulin 4275, which is an IgG that does not bind FZD or LRP.

[0204] The FZD4 Agonists also did not recognize common non-specific antigens. The FZD4 Agonists were tested at 100 nM for binding to a panel of antigens essentially as described in Monquet et al. “Polyreactivity increases the apparent affinity of anti-HIV antibodies by heteroligation” Nature 2010 Sep. 30; 467(7315):591-5(PMC3699875), and Jain et al., “Biophysical properties of the clinical-stage antibody landscape” Proc Natl Acad Sci 2017 Jan. 31; 114(5):944-949. (PMC5293111). Controls in the assay included CM0199, a diabody-Fc-diabody format FZD agonist that recognizes FZD4 and LRP5 and immunoglobulin 6606, which is an IgG that is particularly prone to non-specific binding in this assay. The results are presented in FIG. 8B.

[0205] The FZD4 Agonists comprising binding domains for FZD4 and LRP5 bind both FZD4 and LRP5 with high affinity. The apparent affinity of the FZD4 Agonists for recombinant ECD of FZD4 were determined by biolayer interferometry essentially as described in Elife. 2019 Aug. 27; 8: e46134. Briefly, BLI assays were performed using an Octet HTX instrument (ForteBio). For measuring binding to antigen, FZD-Fc proteins were captured on AHQ BLI sensors (18-5001, ForteBio) to achieve a BLI response of 0.6-1 nm and remaining Fc-binding sites were saturated with human Fc (009-000-008, Jackson ImmunoResearch). FZD-coated or control (Fc-coated) sensors were transferred into 100-0.1 nM tetravalent FZD agonist in assay buffer (PBS, 1% BSA, 0.05% Tween20) and association was monitored for 300 s. Sensors were then transferred into assay buffer and dissociation was monitored for an additional 300 s. Shake speed was 1000 rpm and temperature was 25° C. The results are presented in Table 7.

TABLE 7

| Molecule | FZD4 KD (nM) | LRP5 EC50 (nM) |
|---|---|---|
| CM0199 | 0.7 | 7.5 |
| ANT16 | 0.6 | 1.4 |
| ANT18 | 2.6 | ND |
| ANT20 | 0.7 | ND |
| ANT21 | 2.2 | ND |
| ANT36 | <0.1* | ND |
| ANT39 | 0.3 | ND |

[0206] The FZD4 Agonists were also analyzed by SEC as compared to trastuzumab IgG. The results are presented in FIG. 9A and demonstrate that the diabody-Fc-Fab format Agonists are stable and homogenous in solution.

[0207] The FZD4 Agonists are also stable in solution. Purified FZD4 Agonists, ANT16, ANT18, ANT20, ANT21 and ANT 36 were resuspended to 1 mg/ml (except for ANT18, which was resuspended at 0.34 mg/ml) in 10 mM Histidine, 140 mM NaCl, 0.9% sucrose, pH 6 and stored either at 4° C. or 40° C. for a period of 6 days. Samples were removed at various time points, centrifuged to remove precipitated protein and residual protein concentration was measured. The results are presented in Tables 8 and 9.

TABLE 8

| | Soluble Protein Remaining (%) | | | |
|---|---|---|---|---|
| Time at 40 degrees (days) | 0 | 1 | 2 | 6 |
| CM0199 | 100% | 60% | 64% | 40% |
| ANT-16 | 100% | 102% | 104% | 104% |
| ANT-18 | 100% | 92% | 83% | 105% |
| ANT-20 | 100% | 97% | 67% | 104% |
| ANT-21 | 100% | 102% | 75% | 102% |
| ANT-36 | 100% | 100% | 149% | 106% |

TABLE 9

Active Protein Remaining (%)

| Time at 40 degrees (days) | 0 | 6 |
|---|---|---|
| CM0199 | 100% | 42% |
| ANT-16 | 100% | 34% |
| ANT-18 | 100% | 42% |
| ANT-20 | 100% | 30% |
| ANT-21 | 100% | 25% |

[0208] On Day 6, the amount of FZD4-specific binding sites remaining in the samples were quantified using BLI. Analysis by differential scanning fluorimetry showed that the FZD4 Agonists having a Diabody-Fc-Fab formats with an LRP-binding diabody on the N-terminal of the Fc domain and two FZD4-binding Fabs on the C-terminal of the Fc domain, have thermal denaturation profiles similar to that of Trastuzumab. IgGs generally display two peaks in a thermal stability assay, the first corresponding to CH2, the later to the Fab domain and CH3, see FIG. 9B.

[0209] The FZD4 Agonists were also assayed for induction of the beta-catenin target gene AXIN2 in a mouse endothelial cell line (bEND3.1) and were shown to induce transcription in a concentration dependent manner. These results are presented in FIG. 10.

TABLE 10

| Antibody | | Co-Receptor |
|---|---|---|
| No. | FZD recognized | recognized |
| 5019 | FZD1, FZD2, FZD4, FZD5, FZD7, FZD8 | |
| 5027 | FZD4 | |
| 5044 | FZD4 | |
| 5016 | FZD1, FZD2, FZD4, FZD5, FZD7, FZD8 | |
| 5056 | FZD1, FZD 2, FZD 4, FZD5, FZD7, FZD8, | |
| | FZD10 | |
| 2459 | | LRP5-W3 |
| 2460 | | LRP5-W1 |
| 8716 | | LRP5-W3 |
| 12600 | | LRP5-W1 |
| 12608 | | LPR5-W1 |
| 2539 | | LRP6-W3 |
| 2540 | | LRP6-W3 |
| 2542 | | LRP6-W1 |
| CM0199 | FZD4 | LRP5 |
| 6066 | N/A Positive control for non-specificity assay | |
| 4275 | no FZD/LRP binding | |

[0210] EXAMPLE 4. The FZD4 agonist was assayed for its ability to oppose the effect on cell junction disassembly and increased permeability mediated by VEGF, a cytokine released during tissue hypoxia. VEGF treatment of bEND3.1 cells leads to junction disassembly as seen by loss of plasma membrane staining of CLDN3, CLDN5 and ZO-1. Co-treatment of cells with VEGF and the FZD4 agonist leads to a near-complete rescue of this effect (FIG. 11). This decrease cell-cell junction stability mediated by VEGF treatment translates into increase endothelial cell permeability as monitor in a transendothelial permeability assay measuring the passage of 40-kDa FITC-dextran across a confluent endothelial monolayer of bEnd.3 grown on transwell filters. Co-treatment of cells with VEGF and the FZD4 agonist completely rescues that VEGF-mediated increase in cell permeability. These results indicate that the FZD4 agonist promotes endothelial cell barrier functions in a mechanism independent of VEGF.

A) Immunofluorescence of ZO-1 (green)/CLDN3(red) and ZO-1 (green)/CLDN5(red) localization on bEnd.3 cell junctions. bEnd.3 cells were treated or not with 30 nM of F4L5.13 (aka CM0199) and Norrin in the presence or absence of VEGF (100 ng/ml) for 1h. DAPI (blue) stain the nucleus. B) Transendothelial permeability was determined by measuring the passage of FITC-dextran through the bEnd.3 monolayer. Passage of FITC-dextran was measured after bEnd.3 treatment with VEGF (100 ng/ml) and F4L5.13 (30 nM) alone or simultaneously or upon pre-treatment with VEGF for 1h followed by F4L5.13 treatment for 1h. Error bar indicate SEM, n=5. The results are presented in FIG. 11.

### Example 5. New FZD5 Antibodies Bind FZD5 at a Site Overlapping with 2919 Identified from Affinity Maturation Libraries

[0211] Single point ELISAs were performed on 96-well Maxisorp plates coated with the ECDs of human FZD5 protein in the presence or absence of a saturating concentration of 2919 IgG. The plates were incubated with the monoclonal Fab-phage followed by incubation with horseradish peroxidase (HRP)-conjugated anti-M13 antibody. Wells were subsequently washed 8 times followed by incubations with 3,3,′5,5′-tetramethylbenidine/H₂O₂ peroxidase (TMB) substrate for 5-10 min. the reaction was stopped by adding 1M H₃PO₄ and the absorbance was measured spectrophotometrically at 450 nm in a microtiter plate reader. The results are presented in FIG. 12.

### Example 6. New FZD5 Antibodies from 2928 Affinity Maturation Library Selectively Bind FZD5

[0212] Single point ELISAs were performed on 96-well Maxisorp plates coated with the ECDs of human FZD2, FZD5, or FZD8 protein. The plates were incubated with the monoclonal Fab-phage followed by incubation with horseradish peroxidase (HRP)-conjugated anti-M13 antibody. Wells were subsequently washed 8 times followed by incubations with 3,3,′5,5′-tetramethylbenidine/H₂O₂ peroxidase (TMB) substrate for 5-10 min. the reaction was stopped by adding 1M H₃PO₄ and the absorbance was measured spectrophotometrically at 450 nm in a microtiter plate reader. The results are presented in FIG. 13.

### Example 7. Pan-FZD/LRP6 ANT9 and FZD5-Specific/LRP6 ANT59 Activate Wnt Signaling in Cells

[0213] TOPFLASH HEK293 cells were treated overnight with varying concentrations of FZD agonist or a non-targeting control molecule (CM0156) and TCF/LEF-driven luciferase expression was measured using a standard luciferase assay. Both molecules are able to activate FZD-mediated luciferase expression in a concentration-responsive manner. ANT9, which is able to bind to 7 of the 10 FZD receptor subtypes produces a higher maximal activation signal than the FZD5-specific ANT59. The results are presented in FIG. 14.

[0214] In Vivo Experiments

[0215] DSS Induced Colitis Model

[0216] In FIG. 24, C57/BL6 mice were given 2% DSS in the drinking water for 7 days and 0.5% DSS for an additional 3 days to induce colitis. Control-FLAg, Pan-FLAg and ANT59 were administered via intraperitoneal injection on days 4 and 7 at a dosage of 10 mg/kg. Mice were weighed daily. On day 10 mice were euthanized and tissues were harvested for measurement of colon length and histology.

[0217] Histology

[0218] For histological analysis, harvested tissues were fixed in 4% paraformaldehyde and embedded in paraffin. Sections of 5 μm were stained with haematoxylin and eosin (H&E). Images were captured using a Nikon Eclipse microscope (FIG. 23).

[0219] Organoid Culture and Viability Measurement

[0220] Small intestine crypts were harvested from 8-week-old, female, C57BL/6 mice and cultured as previously described (O'Rourke et al., 2016). Organoid cultures were passaged and embedded in 25 μl Growth Factor Reduced Matrigel (Corning, 356231) and plated in triplicates in a 48-well plate. Organoid cultures were treated with DMSO, 1 μM LGK974, 1 μM LGK974+50% WNT3A conditioned media, 1 μM LGK974+30 nM Pan-FLAg, 1 μM LGK974+30 nM FZD2-FLAg, 1 μM LGK974+30 nM FZD4-FLAg, 1 μM LGK974+30 nM FZDS-FLAg, 1 μM LGK974+30 nM FZD7-FLAg. Treatments were prepared in 250 μl of complete media, added to each well on day of passaging and changed every 2-3 days. At the endpoint (7 days), 150 μl Cell Titer-Glo3D (Promega) was added to 150 μl media in each well. Organoids were lysed on a rocking platform for 30 min at room temperature. The luminescence reading was measured in duplicates for 20 μl lysate from each well on the Envision multilabel plate reader. The average luminescence reading for each condition was normalized to the control condition to calculate relative viability (FIG. 22).

### Example 8. Characterisation of 8 ANT39 Variants

[0221] A. Transient expression of 8 ANT39 variants. A series of eight ANT39 variants (FIGS. 16A and 16B) were transiently expressed in CHO cells using standard manufacture lipid based protocols (ThermoFisher). Nucleotide sequences used are disclosed in Table 23 and SEQ ID NOs: 1030 to 1063. Briefly cells were grown to a density of approximately 2.0×106 cells/ml in growth media and relevant DNAs were transfected with appropriate transfection reagent. For each variant two alternate input plasmid ratios were tested, either 1:1:2 or 2:1:3 (knob heavy chain:hole heavy chain:light chain). Conditioned media was harvested 7 days later, purified by Protein A Sepharose and the titre measured.

TABLE 11

| | DNA Ratio | Titer |
|---|---|---|
| Molecule | (Knob:Hole:LC) | (mg/L) |
| ANT39 | 1:1:2 | 390 |
| | 2:1:3 | 290 |
| ANT39i | 1:1:2 | 260 |
| | 2:1:3 | 250 |
| ANT39 LALAPS | 1:1:2 | 330 |
| | 2:1:3 | 250 |
| ANT39i LALAPS | 1:1:2 | 300 |
| | 2:1:3 | 270 |
| ANT39 LALAPS Merchant | 1:1:2 | 340 |
| | 2:1:3 | 280 |
| ANT39i LALAPS Merchant | 1:1:2 | 240 |
| | 2:1:3 | 280 |
| ANT39 LALAPS Merchant S:S | 1:1:2 | 320 |
| | 2:1:3 | 190 |
| ANT39i LALAPS Merchant S:S | 1:1:2 | 300 |
| | 2:1:3 | 250 |
| ANT42* | 1:1:2 | 107 |
| ANT42 LALA* | 1:1:2 | 287 |
| ANT42 LALAPS* | 1:1:2 | 95 |
| ANT42i LALAPS* | 1:1:2 | 49 |

*Variants were transiently expressed in HEK293 cells

[0222] B. Eight ANT39 variants, produced at 2:1:3 DNA ratio, were analysed by SEC-HPLC purity after purification using Protein A Sepharose at 280 nm wavelength. Briefly, samples were loaded on to a Protein A column (POROS®A 20 m Column, Stainless Steel, 2.1 mm×30 mm, 0.1 mL) at neutral pH, where the samples are bound to the Protein A ligands and retained on the column. Then the retained antibodies are eluted with an acidic eluent (100 mM Glycine, 150 mM NaCl, pH 2.5) and detected by UV absorbance at 280 nm. The concentration of the sample is quantified by external standard method. Size exclusion chromatography was performed on an Agilent UPLC system with a SEC column (Waters Acquity BEH 150×4.6 mm, 1.7 μm). The sampler temperature was set to 5±3° C. and the column oven temperature was set as 25±3° C. The mobile phase was 50 mM PB, 300 mM NaCl, pH 6.8±0.1 and the flow rate was set as 0.4 mL/min. 10 μg of each sample was injected. Detection wavelength was set at 280 nm and the run time was 8 minutes. Data was analyzed by Agilent CDS Software.

[0223] Results are shown in Table 12 and FIG. 26.

TABLE 12

| Molecule | SEC HPLC (%) |
|---|---|
| ANT39 | 76.1 |
| ANT39i | 37.1 |
| ANT39 LALAPS | 76.5 |
| ANT39i LALAPS | 28.8 |
| ANT39 LALAPS Merchant | 83.5 |
| ANT39i LALAPS Merchant | 31 |
| ANT39 LALAPS Merchant S:S | 80 |
| ANT39i LALAPS Merchant S:S | 25.4 |

[0224] C. Four ANT39 variants were produced at a 15 L scale after transfection at a 2:1:3 Knob chain: Hole chain: Light chain ratio. Protein titre was measured and is shown in Table 13. SEC HPLC purity was measured, and the results shown in Table 13 and FIG. 27. Mass spectrometry analysis was conducted. Briefly, the protein samples were reduced by DTT, then the glycans on the protein were removed with Rapid PNGase F. Then the reduced species were separated by reversed phase liquid chromatography on the UPLC system (Agilent/PLRP-S 1000 Å 2.1×50 mm, 8 μm column) coupled to mass spectrometer (Waters/Xevo G2 Q-TOF MS or equivalent). The raw data was analyzed and processed by deconvolution software. This mass-spectrometry analysis indicated no detectable homodimer molecules (FIG. 28). A cell-based beta-catenin reporter assay was used, as described in Example 3, to determine the potency of the molecules in comparison to a non-targeting control molecule (CM0156). TOPFLASH cells were treated overnight with varying concentrations of FZD agonist or a non-targeting control molecule (CM0156) and TCF/LEF-driven luciferase expression was measured using a standard luciferase assay. Results are shown in FIG. 29.

TABLE 13

| | Titre | SEC HPLC | |
|---|---|---|---|
| Molecule | (g/L) | purity (%) | Homodimers |
| ANT39 | 3.69 | 97.4 | Not detected |
| ANT39 LALAPS | 3.75 | 96.5 | Not detected |
| ANT39 LALAPS Merchant | 3.45 | 97.1 | Not detected |
| ANT39 LALAPS Merchant S:S | 3.08 | 97.5 | Not detected |

[0225] The Melting Point (Tₘ) of each molecule was determined using Differential Scanning calorimeter. Differential scanning calorimetry (DSC) is a thermos-analytical technique used to characterize the thermal stability of protein samples and assess conformational differences between them. Measurements were performed on MicroCal PEAQ DSC (Malvern) for thermal transition midpoint (Tm) and onset of unfolding (TOnset) testing. Samples were diluted to 1 mg/mL with the reference buffer. Experimental parameters were set such that the scan temperature ramped from 10 to 95° C. at a scan rate of 200° C./h. Data analysis was performed in MicroCal PEAQ-DSC automated data analysis software. The melting points for each of the molecules tested were higher that 50° C., showing a high stability for each molecule (Table 14)

TABLE 14

| Molecule | T_{Onset} | Tₘ1 | Tₘ2 | Tₘ3 |
|---|---|---|---|---|
| ANT39 DANG | 52.3 | 61.4 | 68.4 | 85.8 |
| ANT39 LALAPS | 56.2 | 63.9 | 67.2 | 86.5 |
| ANT39 LALAPS | 59.4 | 67.7 | 74.4 | 86.5 |
| Merchant | | | | |
| ANT39 LALAPS | 59.2 | 67.1 | 86.1 | NA |
| Merchant S-S | | | | |

[0226] D. The stability of four ANT39 variants was assessed by applying stress to the molecules in buffer solution and compared to a benchmark IgG. After the application of stress, characteristics of the molecules were determined. 5 mg/mL of each molecule was prepared in formulation buffer (20 mM Histidine, 8% sucrose, 0.04% PS80, pH6.0). The conditions for each test are described in Table 15, with measurements taken before the stress testing (TO) and at each time point described.

TABLE 15

| | | Time | Time | Time |
|---|---|---|---|---|
| | | Point 1 | Point 2 | Point 3 |
| Test | Condition | (label) | (label) | (label) |
| Thermal | Incubation at | 1 week | 2 weeks | 4 weeks |
| Stress | 40° C. | (40C-1W) | (40C-2W) | (40C-4W) |
| Oxidation | Incubation at 2% | 4 hours | 24 hours | N/A |
| Stress | AAPH at 25° C. | (AAPH-4h) | (AAPH-24h) | |
| Agitation | Agitation at 300 | 1 day | 3 days | N/A |
| Stress | rm at 25° C. | (A-1D) | (A-3D) | |
| Freeze- | Cycles of −70° C. | 3 cycles | 5 cycles | N/A |
| Thaw | to room | (FT-3C) | (FT-3C) | |
| Stress | temperature | | | |

[0227] At each time point, the sample were clear, colorless and free of visible particles, with the exception of 40C-4W wherein the samples had a slight yellow coloring.

[0228] DLS was conducted on samples submitted to Oxidative, Agitation and Freeze-Thaw Stress to determine the hydrodynamic radiuses (Rh). The detection of Rh was performed on Wyatt DynaPro Plate Reader II. 20 μL of the sample was added into corresponding position, and the well plate was then centrifuged for 5 minutes at 5° C. with the speed of 4000 rpm. During the experiment, Rh was detected under 25° C., and the data was analyzed by the DYNAMICS 7.7.0.125 software. There was no obvious change under stress conditions compared to the starting formulations (TO). Results are shown in Table 16.

TABLE 16

| | | Molecule | | | | | | | | | | | | | |
|---|---|---|---|---|---|---|---|---|---|---|---|---|---|---|---|
| | | ANT39 DANG | | | | | | | ANT39 LALAPS | | | | | | |
| | | Condition | | | | | | | | | | | | | |
| | | | AAPH- | AAPH- | A- | A- | FT- | FT- | | AAPH- | AAPH- | A- | A- | FT- | FT- |
| | | T0 | 4 h | 24 h | 1 D | 3 D | 3 C | 5 C | T0 | 4 h | 24 h | 1 D | 3 D | 3 C | 5 C |
| DLS | Radius (nm) | 7.9 | 9.1 | 9.0 | 7.8 | 7.7 | 8.0 | 8.0 | 7.7 | 9.3 | 9.2 | 7.6 | 7.5 | 8.5 | 8.3 |
| | % PD | 22.2 | 15.7 | 14.7 | 19.6 | 18.5 | 22.0 | 20.9 | 15.1 | 21.9 | 20.4 | 14.8 | 13.2 | 13.6 | 24.9 |
| | | Molecule | | | | | | | | | | | | | |
| | | ANT39 LALAPS Merchant | | | | | | | ANT39 LALAPS Merchant S-S | | | | | | |
| | | Condition | | | | | | | | | | | | | |
| | | | AAPH- | AAPH- | A- | A- | FT- | FT- | | AAPH- | AAPH- | A- | A- | FT- | FT- |
| | | T0 | 4 h | 24 h | 1 D | 3 D | 3 C | 5 C | T0 | 4 h | 24 h | 1 D | 3 D | 3 C | 5 C |
| DLS | Radius (nm) | 7.6 | 9.5 | 9.7 | 7.6 | 7.5 | 7.9 | 7.9 | 7.3 | 9.1 | 9.1 | 7.2 | 7.3 | 7.6 | 7.4 |
| | % PD | 15.3 | 16.2 | 13.5 | 15.7 | 14.7 | 21.1 | 20.8 | 11.6 | 12.2 | 12.3 | 11.8 | 9.6 | 11.9 | 12.0 |

[0229] SEC analysis was performed on all samples. The purity of the monomer did not show obvious changes after Agitation and Freeze Thaw Stress compared to T0. Thermal and Oxidation Stress resulted in decreased percentage monomer compared to T0, as shown in Table 17. After Oxidation Stress, ANT39 LALAPs showed a higher percentage monomer (lower decrease compared to TO) than the other molecules tested.

[0230] iCIEF was conducted to determine the percentage of main charge isoform present in each sample (Table 17). For iCIEF, the protein sample was mixed with specific master mixture and then analyzed with iCE3 Capillary Isoelectric Focusing Analyzer equipped with a fluorocarbon (FC)-coated whole-column detection capillary. The pI value and relative abundance of the resolved peaks were quantitated using chromatographic software. ANT39 LALAPS showed the highest percentage of the main charge isoform compared to T0 after both Thermal and Oxidation Stress.

[0231] Caliper-SDS was performed to determine the purity of samples. Caliper-SDS was performed on a PerkinElmer Caliper automated electrophoresis using non-reduced samples. The sample denaturing solution was prepared by mixing sample buffer with 10% sodium dodecyl sulfate (SDS) and 100 mM N-Ethylmaleimide (NEM). Prepared samples were loaded, stained, separated and detected in the High-throughput Protein Express LabChip filled with destain-gel, gel-dye and maker. The raw data was analyzed with LabChip GX Reviewer software. The results are shown in Table 17. ANT39 LALAPS Merchant S-S showed the highest purity after Thermal Stress, whereas ANT39 LALAPS showed the highest purity after Oxidation Stress.

TABLE 17

| | % decrease compared to T0 | | | | | |
|---|---|---|---|---|---|---|
| | Thermal Stress (4 Weeks) | | | Oxidation Stress (24 h) | | |
| | | % | | | % | |
| | % | Main | % | % | Main | % |
| | Mono- | Charge | Pu- | Mono- | Charge | Pu- |
| Molecule | mer | isoform | rity | mer | isoform | rity |
| Benchmark | 10 | 25 | 20 | 10 | 25 | 20 |
| IgG | | | | | | |
| ANT39 | 30 | 38 | 23 | 6 | 27 | 15 |
| DANG | | | | | | |
| ANT39 | 17 | 31 | 21 | 1 | 4 | 3 |
| LALAPS | | | | | | |
| ANT39 | 24 | 39 | 42 | 7 | 28 | 12 |
| LALAPS | | | | | | |
| Merchant | | | | | | |
| ANT39 | 17 | 38 | 16 | 6 | 31 | 9 |
| LALAPS | | | | | | |
| Merchant | | | | | | |
| S-S | | | | | | |

[0232] The potency of each molecule after Thermal Stress and Oxidative Stress was calculated according to Example 3. The results are shown in FIG. 30. FIG. 30A shows the results of the negative control molecule (ANT67), standardisation molecules (ANT39 LALAPS P1 and P3, and ANT39 DANG) and the test molecules at TO. FIG. 30B shows the control and standardisation molecules compared to the test molecules after being subjected to 40° C. for 40 weeks. FIG. 30C shows the control and standardisation molecules compared to the test molecules after 24 hours of Oxidation Stress. All test molecules had similar potency after Thermal Stress (FIG. 30B). ANT39 LALAPS had the highest potency after 24 hours of Oxidation Stress compared to the remaining molecules (FIG. 30C).

[0233] Overall, the ANT39 LALAPS molecule showed increased stability and potency after stress compared to the other molecules.

[0234] Those skilled in the art will recognize, or be able to ascertain, using no more than routine experimentation, numerous equivalents to the specific procedures described herein. Such equivalents are considered to be within the scope of the inventions. Various substitutions, alterations and modifications may be made to the invention without departing from the spirit and scope of the invention. Other aspects, advantages, and modifications are within the scope of the invention.

[0235] The contents of all references, issued patents, and published patent applications cited through this application are hereby incorporated by reference. The appropriate component, process and methods of those patents, applications and other documents may be selected for the invention and embodiments thereof.

[0236] Throughout the specification and the claims which follow, unless the context requires otherwise, the word ‘comprise’, and variations such as ‘comprises’ and ‘comprising’, will be understood to imply the inclusion of a stated integer, step, group of integers or group of steps but not to the exclusion of any other integer, step, group of integers or group of steps.

[0237] To clarify the use of and to hereby provide notice to the public, the phrases “at least one of <A>, <B>, . . . and <N>” or “at least one of <A>, <B>, . . . or <N>” or “at least one of <A>, <B>, . . . <N>, or combinations thereof” or “<A>, <B>, . . . and/or <N>” are defined by the Applicant in the broadest sense, superseding any other implied definitions hereinbefore or hereinafter unless expressly asserted by the Applicant to the contrary, to mean one or more elements selected from the group comprising A, B, . . . and N. In other words, the phrases mean any combination of one or more of the elements A, B, . . . or N including any one element alone or the one element in combination with one or more of the other elements which may also include, in combination, additional elements not listed. Unless otherwise indicated or the context suggests otherwise, as used herein, “a” or “an” means “at least one” or “one or more.”

TABLE 18
Diabody-Fc-Fab amino acid sequences of the “heavy chain” hole construct, “heavy chain” knob
construct and the “light chain” construct of the FZD4 Agonists, ANT16, ANT18, ANT20, ANT21,
ANT39, and ANT42. The CDRs of the chains are underlined, italicized. The CDRs may be replaced
with the CDRs of another antibody to alter the binding specificity, e.g., the specificity could
be altered to bind another site on the FZD or LPR5/6, or to another FZD or LPR.
FZD4 Agonist ANT16

| | |
|---|---|
| Knob HC | EVQLVESGGGLVQPGGSLRLSCAASGF [symbol] WVRQAPGKGLEWVA [symbol] YADSVKGRFTISADTSKNTAYLQ |
| construct | MNSLRAEDTAVYYCAR [symbol] DYWGQGTLVTVSSGGGGSDIQMTQSPSSLSASVGDRVTITCRAS [symbol] VAWYQQKPGK |
| | APKLLIY [symbol] GVPSRFSGSRSGTDFTLTISSLQPEDFATYYCQQ [symbol] TFGQGTKVEIKGGGGSGGGGSEPKTSDKT |
| | HTCPPCPAPELLGGPSVFLFPPKPKDTLMISRTPEVTCVVVAVSHEDPEVKFNWYVDGVEVHNAKTKPREEQYGSTYRVVSVLTV |
| | LHQDWLNGKEYKCKVSNKALPAPIEKTISKAKGQPREPMVFDLPPSREEMTKNQVSLWCMVKGFYPSDIAVEWESNGQPENNY |
| | KTTPPVLDSDGSFFLYSKLTVDKSRWQQGNVFSCSVMHEALHNHYTQKSLSLSPGKGGGSGGGSGGGSGGGSGSTGEVQLVES |
| | GGGLVQPGGSLRLSCAASGF [symbol] HWVRQAPGKGLEWVA [symbol] YADSVKGRFTISADTSKNTAYLQMNSLRAED |
| | TAVYYCAR [symbol] DYWGQGTLVTVSSASTKGPSVFPLAPSSKSTSGGTAALGCLVKDYFPEPVTVSWNSGALTSGVHTFP |
| | AVLQSSGLYSLSSVVTVPSSSLGTQTYICNVNHKPSNTKVDKKVEPKSCDKTHT (SEQ ID NO: 897) |
| Hole HC | EVQLVESGGGLVQPGGSLRLSCAASGF [symbol] HWVRQAPGKGLEWVA [symbol] YADSVKGRFTISADTSKNTAYLQMN |
| construct | SLRAEDTAVYYCAR [symbol] DYWGQGTLVTVSSGGGGSDIQMTQSPSSLSASVGDRVTITCRAS [symbol] VAWYQQKPGKAPKL |
| | LIY [symbol] GVPSRFSGSRSGTDFTLTISSLQPEDFATYYCQQ [symbol] TFGQGTKVEIKGGGGSGGGGSEPKSSDKTHTCP |
| | PCPAPELLGGPSVFLFPPKPKDTLMISRTPEVTCVVVAVSHEDPEVKFNWYVDGVEVHNAKTKPREEQYGSTYRVVSVLTVLHQD |
| | WLNGKEYKCKVSNKALPAPIEKTISKAKGQPREPQVYTLPPIRELMTSNQVSLSCAVKGFYPSDIAVEWESNGQPENNYKTTPPV |
| | LDSDGSFFLVSKLTVDKSRWQQGNVFSCSVMHEALHNHYTQKSLSLSPGKGGGSGGGSGGGSGGGSGSTGEVQLVESGGGLVQ |
| | PGGSLRLSCAASGF [symbol] HWVRQAPGKGLEWVA [symbol] YADSVKGRFTISADTSKNTAYLQMNSLRAEDTAVYYC |
| | AR [symbol] DYWGQGTLVTVSSASTKGPSVFPLAPSSKSTSGGTAALGCLVKDYFPEPVTVSWNSGALTSGVHTFPAVLQSS |
| | GLYSLSSVVTVPSSSLGTQTYICNVNHKPSNTKVDKKVEPKSCDKTHT (SEQ ID NO: 898) |
| Light | [sequence omitted] [symbol] VAWYQQKPGKAPKLLIY [symbol] SGVPSRFSGSRSGTDFTLTISSLQPEDFA |
| Chain | TYYCQQ [symbol] TFGQGTKVEIKRTVAAPSVFIFPPSDEQLKSGTASVVCLLNNFYPREAKVQWKVDNALQSGNSQESVTEQDS |
| | KDSTYSLSSTLTLSKADYEKHKVYACEVTHQGLSSPVTKSFNRGEC (SEQ ID NO: 899) |

FZD4 Agonist ANT18

| | |
|---|---|
| Knob HC | MNLLLILTFVAAAVAEVQLVESGGGMVQPGGSLRLSCAASGF [symbol] HWV |
| construct | RQAPGKGLEWVA [symbol] YADSVKGRFTISADTSKNTAYLQMNSLRAE |
| | DTAVYYCAR [symbol] [symbol] DYWGQGTLVTVSSGGGGSDIQMT |
| | QSPSSLSASVGDRVTITCRASQ [symbol] VAWYQQKPGKAPKLLIY [symbol] GVP |
| | SRFSGSRSGTDFTLTISSLQPEDFATYYCQQ [symbol] TFGQGTKVEIKGGGGSG |
| | GGGSEPKTSDKTHTCPPCPAPELLGGPSVFLFPPKPKDTLMISRTPEVTCVVVA |
| | VSHEDPEVKFNWYVDGVEVHNAKTKPREEQYGSTYRVVSVLTVLHQDWLN |
| | GKEYKCKVSNKALPAPIEKTISKAKGQPREPMVFDLPPSREEMTKNQVSLWC |
| | MVKGFYPSDIAVEWESNGQPENNYKTTPPVLDSDGSFFLYSKLTVDKSRWQQ |
| | GNVFSCSVMHEALHNHYTQKSLSLSPGKGGGSGGGSGGGSGGGSGSTGEVQ |
| | LVESGGGLVQPGGSLRLSCAASGF [symbol] WVRQAPGKGLEWVA [symbol] |
| | [symbol] YADSVKGRFTISADTSKNTAYLQMNSLRAEDTAVYYCAR [symbol] |
| | DYWGQGTLVTVSSASTKGPSVFPLAPSSKSTSGGTAALGCLVKDYFPEPVTVS |
| | WNSGALTSGVHTFPAVLQSSGLYSLSSVVTVPSSSLGTQTYICNVNHKPSNTK |
| | VDKKVEPKSCDKTHT (SEQ ID NO: 900) |
| Hole HC | MNLLLILTFVAAAVAEVQLVESGGGLVQPGGSLRLSCAASGF [symbol] HWV |
| construct | RQAPGKGLEWVA [symbol] YADSVKGRFTISADTSKNTAYLQMNSLRAE |
| | DTAVYYCAR [symbol] DYWGQGTLVTVSSGGGGSDIQMTQSPSSLSA |
| | SVGDRVTITCRASQ [symbol] VAWYQQKPGKAPKLLIY [symbol] GVPSRFSGSRS |
| | GTDFTLTISSLQPEDFATYYCQQ [symbol] TFGQGTKVEIKGGGGSGGGGSEPKS |
| | SDKTHTCPPCPAPELLGGPSVFLFPPKPKDTLMISRTPEVTCVVVAVSHEDPEV |
| | KFNWYVDGVEVHNAKTKPREEQYGSTYRVVSVLTVLHQDWLNGKEYKCKV |
| | SNKALPAPIEKTISKAKGQPREPQVYTLPPIRELMTSNQVSLSCAVKGFYPSDI |
| | AVEWESNGQPENNYKTTPPVLDSDGSFFLVSKLTVDKSRWQQGNVFSCSVM |
| | HEALHNHYTQKSLSLSPGKGGGSGGGSGGGSGGGSGSTGEVQLVESGGGLV |
| | QPGGSLRLSCAASGF [symbol] HWVRQAPGKGLEWVA [symbol] YADSV |
| | KGRFTISADTSKNTAYLQMNSLRAEDTAVYYCAR [symbol] DYWGQGTL |
| | VTVSSASTKGPSVFPLAPSSKSTSGGTAALGCLVKDYFPEPVTVSWNSGALTS |
| | GVHTFPAVLQSSGLYSLSSVVTVPSSSLGTQTYICNVNHKPSNTKVDKKVEPK |
| | SCDKTHT (SEQ ID NO: 901) |
| Light | MNLLLILTFVAAAVADIQMTQSPSSLSASVGDRVTITCRAS [symbol] VAWYQQ |
| Chain | KPGKAPKLLIY [symbol] GVPSRFSGSRSGTDFTLTISSLQPEDFATYYCQQ [symbol] |
| | [symbol] TFGQGTKVEIKRTVAAPSVFIFPPSDEQLKSGTASVVCLLNNFYPREAKVQ |
| | WKVDNALQSGNSQESVTEQDSKDSTYSLSSTLTLSKADYEKHKVYACEVTH |
| | QGLSSPVTKSFNRGEC (SEQ ID NO: 902) |

FZD4 Agonist ANT20

| | |
|---|---|
| Knob Hc | MNLLLILTFVAAAVAEVQLVESGGGLVQPGGSLRLSCAASGF [symbol] HWV |
| construct | RQAPGKGLEWVA [symbol] YADSVKGRFTISADTSKNTAYLQMNSLRAED |
| | TAVYYCAR [symbol] DYWGQGTLVTVSSGGGGSDIQMTQSPSSLSASVGDRV |
| | TITCRASQ [symbol] VAWYQQKPGKAPKLLIY [symbol] GVPSRFSGSRSGTDFTLT |
| | ISSLQPEDFATYYCQQ [symbol] TGQGTKVEIKGGGGSGGGGSEPKTSDKTHTC |
| | PPCPAPELLGGPSVFLFPPKPKDTLMISRTPEVTCVVVAVSHEDPEVKFNWYVD |
| | GVEVHNAKTKPREEQYGSTYRVVSVLTVLHQDWLNGKEYKCKVSNKALPAPI |
| | EKTISKAKGQPREPMVFDLPPSREEMTKNQVSLWCMVKGFYPSDIAVEWESN |
| | GQPENNYKTTPPVLDSDGSFFLYSKLTVDKSRWQQGNVFSCSVMHEALHNHY |
| | TQKSLSLSPGKGGGSGGGSGGGSGGGSGSTGEVQLVESGGGLVQPGGSLRLSC |
| | AASGF [symbol] HWVRQAPGKGLEWVA [symbol] YADSVKGRFTISADTS |
| | KNTAYLQMNSLRAEDTAVYYCAR [symbol] DYWGQGTLVTVSSASTKGPS |
| | VFPLAPSSKSTSGGTAALGCLVKDYFPEPVTVSWNSGALTSGVHTFPAVLQSSG |
| | LYSLSSVVTVPSSSLGTQTYICNVNHKPSNTKVDKKVEPKSCDKTHT (SEQ ID |
| | NO: 903) |
| Hole Hc | MNLLLILTFVAAAVAEVQLVESGGGLVQPGGSLRLSCAASGF [symbol] HWV |
| construct | RQAPGKGLEWVA [symbol] YADSVKGRFTISADTSKNTAYLQMNSLRAED |
| | TAVYYCAR [symbol] DYWGQGTLVTVSSGGGGSDIQMTQSPSSLSASV |
| | GDRVTITCRASQ [symbol] VAWYQQKPGKAPKLLIY [symbol] GVPSRFSGSRSGT |
| | DFTLTISSLQPEDFATYYCQQ [symbol] TFGQGTKVEIKGGGGSGGGGSEPKSS |
| | DKTHTCPPCPAPELLGGPSVFLFPPKPKDTLMISRTPEVTCVVVAVSHEDPEVK |
| | FNWYVDGVEVHNAKTKPREEQYGSTYRVVSVLTVLHQDWLNGKEYKCKVS |
| | NKALPAPIEKTISKAKGQPREPQVYTLPPIRELMTSNQVSLSCAVKGFYPSDIAV |
| | EWESNGQPENNYKTTPPVLDSDGSFFLVSKLTVDKSRWQQGNVFSCSVMHEA |
| | LHNHYTQKSLSLSPGKGGGSGGGSGGGSGGGSGSTGEVQLVESGGGLVQPGG |
| | SLRLSCAASGF [symbol] HWVRQAPGKGLEWVA [symbol] YADSVKGRFTI |
| | SADTSKNTAYLQMNSLRAEDTAVYYCAR [symbol] DYWGQGTLVTVSSAS |
| | TKGPSVFPLAPSSKSTSGGTAALGCLVKDYFPEPVTVSWNSGALTSGVHTFPAV |
| | LQSSGLYSLSSVVTVPSSSLGTQTYICNVNHKPSNTKVDKKVEPKSCDKTHT |
| | (SEQ ID NO: 904) |
| Light | MNLLLILTFVAAAVADIQMTQSPSSLSASVGDRVTITCRAS [symbol] VAWYQQ |
| Chain | KPGKAPKLLIY [symbol] GVPSRFSGSRSGTDFTLTISSLQPEDFATYYCQQ [symbol] |
| | [symbol] TFGQGTKVEIKRTVAAPSVFIFPPSDEQLKSGTASVVCLLNNFYPREAKVQ |
| | WKVDNALQSGNSQESVTEQDSKDSTYSLSSTLTLSKADYEKHKVYACEVTHQ |
| | GLSSPVTKSFNRGEC (SEQ ID NO: 902) |

FZD4 Agonist ANT21

| | |
|---|---|
| Knob Hc | MNLLLILTFVAAAVAEVQLVESGGGLVQPGGSLRLSCAASGF [symbol] HWVR |
| construct | QAPGKGLEWVA [symbol] YADSVKGRFTISADTSKNTAYLQMNSLRAED |
| | TAVYYCAR [symbol] [symbol] DYWGQGTLVTVSSGGGGSDIQMTQS |
| | PSSLSASVGDRVTITCRAS [symbol] VAWYQQKPGKAPKLLIY [symbol] GVPSR |
| | FSGSRSGTDFTLTISSLQPEDFATYYCQQ [symbol] TFGQGTKVEIKGGGGSG |
| | GGGSEPKTSDKTHTCPPCPAPELLGGPSVFLFPPKPKDTLMISRTPEVTCVVVAVS |
| | HEDPEVKFNWYVDGVEVHNAKTKPREEQYGSTYRVVSVLTVLHQDWLNGKEYKC |
| | KVSNKALPAPIEKTISKAKGQPREPMVFDLPPSREEMTKNQVSLWCMVKGFYPS |
| | DIAVEWESNGQPENNYKTTPPVLDSDGSFFLYSKLTVDKSRWQQGNVFSCSV |
| | MHEALHNHYTQKSLSLSPGKGGGSGGGSGGGSGGGSGSTGEVQLVESGGGL |
| | VQPGGSLRLSCAASGF [symbol] HWVRQAPGKGLEWVA [symbol] YADS |
| | VKGRFTISADTSKNTAYLQMNSLRAEDTAVYYCAR [symbol] DYWGQGT |
| | LVTVSSASTKGPSVFPLAPSSKSTSGGTAALGCLVKDYFPEPVTVSWNSGALT |
| | SGVHTFPAVLQSSGLYSLSSVVTVPSSSLGTQTYICNVNHKPSNTKVDKKVEP |
| | KSCDKTHT (SEQ ID NO: 905) |
| Hole Hc | MNLLLILTFVAAAVAEVQLVESGGGLVQPGGSLRLSCAASGF [symbol] HWVR |
| construct | QAPGKGLEWVA [symbol] YADSVKGRFTISADTSKNTAYLQMNSLRAED |
| | TAVYYCAR [symbol] DYWGQGTLVTVSSGGGGSDIQMTQSPSSLSASVGDRVTI |
| | TCRASQ [symbol] VAWYQQKPGKAPKLLIY [symbol] GVPSRFSGSRSGTDFTLTI |
| | SSLQPEDFATYYCQQ [symbol] TFGQGTKVEIKGGGGSGGGGSEPKSSDKTHTCP |
| | PCPAPELLGGPSVFLFPPKPKDTLMISRTPEVTCVVVAVSHEDPEVKFNWYVD |
| | GVEVHNAKTKPREEQYGSTYRVVSVLTVLHQDWLNGKEYKCKVSNKALPAP |
| | IEKTISKAKGQPREPQVYTLPPIRELMTSNQVSLSCAVKGFYPSDIAVEWESNG |
| | QPENNYKTTPPVLDSDGSFFLVSKLTVDKSRWQQGNVFSCSVMHEALHNHY |
| | TQKSLSLSPGKGGGSGGGSGGGSGGGSGSTGEVQLVESGGGLVQPGGSLRLS |
| | CAASGF [symbol] HWVRQAPGKGLEWVA [symbol] YADSVKGRFTISAD |
| | TSKNTAYLQMNSLRAEDTAVYYCAR [symbol] DYWGQGTLVTVSSASTK |
| | GPSVFPLAPSSKSTSGGTAALGCLVKDYFPEPVTVSWNSGALTSGVHTFPAVL |
| | QSSGLYSLSSVVTVPSSSLGTQTYICNVNHKPSNTKVDKKVEPKSCDKTHT |
| | (SEQ ID NO: 906) |
| Light | MNLLLILTFVAAAVADIQMTQSPSSLSASVGDRVTITCRAS [symbol] VAWYQQ |
| Chain | KPGKAPKLLIY [symbol] SGVPSRFSGSRSGTDFTLTISSLQPEDFATYYCQQ [symbol] |
| | [symbol] TFGQGTKVEIKRTVAAPSVFIFPPSDEQLKSGTASVVCLLNNFYPREAKVQ |
| | WKVDNALQSGNSQESVTEQDSKDSTYSLSSTLTLSKADYEKHKVYACEVTH |
| | QGLSSPVTKSFNRGEC (SEQ ID NO: 902) |

FZD4 Agonist ANT39

| | |
|---|---|
| Knob Hc | MNLLLILTFVAAAVAEVQLVESGGGLVQPGGSLRLSCAASGF [symbol] HW |
| construct | VRQAPGKGLEWVA [symbol] YADSVKGRFTISADTSKNTAYLQMNSLRA |
| | EDTAVYYCAR [symbol] DYWGQGTLVTVSSGGGGSDIQMTQSPSSLSASVG |
| | DRVTITCRAS [symbol] VAWYQQKPGKAPKLLIY [symbol] GVPSRFSGSRSGT |
| | DFTLTISSLQPEDFATYYCQQ [symbol] TFGQGTKVEIKGGGGSGGGGSEPK |
| | TSDKTHTCPPCPAPELLGGPSVFLFPPKPKDTLMISRTPEVTCVVVAVSHEDPE |
| | VKFNWYVDGVEVHNAKTKPREEQYGSTYRVVSVLTVLHQDWLNGKEYKC |
| | KVSNKALPAPIEKTISKAKGQPREPMVFDLPPSREEMTKNQVSLWCMVKGFY |
| | PSDIAVEWESNGQPENNYKTTPPVLDSDGSFFLYSKLTVDKSRWQQGNVFSC |
| | SVMHEALHNHYTQKSLSLSPGKGGGSGGGSGGGSGGGSGSTGEVQLVESGG |
| | GLVQPGGSLRLSCAASGF [symbol] HWVRQAPGKGLEWVA [symbol] YA |
| | DSVKGRFTISADTSKNTAYLQMNSLRAEDTAVYYCAR [symbol] DYWGQ |
| | GTLVTVSSASTKGPSVFPLAPSSKSTSGGTAALGCLVKDYFPEPVTVSWNSGA |
| | LTSGVHTFPAVLQSSGLYSLSSVVTVPSSSLGTQTYICNVNHKPSNTKVDKKV |
| | EPKSCDKTHT (SEQ ID NO: 907) |
| Hole Hc | MNLLLILTFVAAAVAEVQLVESGGGLVQPGGSLRLSCAASGF [symbol] HWV |
| construct | RQAPGKGLEWVA [symbol] YADSVKGRFTISADTSKNTAYLQMNSLRAE |
| | DTAVYYCAR [symbol] DYWGQGTLVTVSSGGGGSDIQMTQSPSSLSASVGDRV |
| | TITCRAS [symbol] VAWYQQKPGKAPKLLIY [symbol] GVPSRFSGSRSGTDFTL |
| | TISSLQPEDFATYYCQQ [symbol] TFGQGTKVEIKGGGGSGGGGSEPKSSDKT |
| | HTCPPCPAPELLGGPSVFLFPPKPKDTLMISRTPEVTCVVVAVSHEDPEVKFN |
| | WYVDGVEVHNAKTKPREEQYGSTYRVVSVLTVLHQDWLNGKEYKCKVSN |
| | KALPAPIEKTISKAKGQPREPQVYTLPPIRELMTSNQVSLSCAVKGFYPSDIAV |
| | EWESNGQPENNYKTTPPVLDSDGSFFLVSKLTVDKSRWQQGNVFSCSVMHE |
| | ALHNHYTQKSLSLSPGKGGGSGGGSGGGSGGGSGSTGEVQLVESGGGLVQP |
| | GGSLRLSCAASGF [symbol] HWVRQAPGKGLEWVA [symbol] YADSVKG |
| | RFTISADTSKNTAYLQMNSLRAEDTAVYYCAR [symbol] DYWGQGTLVT |
| | VSSASTKGPSVFPLAPSSKSTSGGTAALGCLVKDYFPEPVTVSWNSGALTSGV |
| | HTFPAVLQSSGLYSLSSVVTVPSSSLGTQTYICNVNHKPSNTKVDKKVEPKSC |
| | DKTHT (SEQ ID NO: 908) |
| Light | MNLLLILTFVAAAVADIQMTQSPSSLSASVGDRVTITCRAS [symbol] VAWYQ |
| Chain | QKPGKAPKLLIY [symbol] GVPSRFSGSRSGTDFTLTISSLQPEDFATYYCQQ [symbol] |
| | [symbol] TFGQGTKVEIKRTVAAPSVFIFPPSDEQLKSGTASVVCLLNNFYPREAK |
| | VQWKVDNALQSGNSQESVTEQDSKDSTYSLSSTLTLSKADYEKHKVYACEV |
| | THQGLSSPVTKSFNRGEC (SEQ ID NO: 909) |

FZD4 Agonist ANT42

| | |
|---|---|
| Knob Hc | MNLLLILTFVAAAVAEVQLVESGGGLVQPGGSLRLSCAASGF [symbol] HW |
| construct | VRQAPGKGLEWVA [symbol] YADSVKGRFTISADTSKNTAYLQMNSLRA |
| | EDTAVYYCAR [symbol] DYWGQGTLVTVSSGGGGSDIQMTQSPSSLSASVGD |
| | RVTITCRAS [symbol] VAWYQQKPGKAPKLLIY [symbol] GVPSRFSGSRSGTDF |
| | TLTISSLQPEDFATYYCQQ [symbol] TFGQGTKVEIKGGGGSGGGGSEPKTSD |
| | KTHTCPPCPAPELLGGPSVFLFPPKPKDTLMISRTPEVTCVVVAVSHEDPEVKF |
| | NWYVDGVEVHNAKTKPREEQYGSTYRVVSVLTVLHQDWLNGKEYKCKVSN |
| | KALPAPIEKTISKAKGQPREPMVFDLPPSREEMTKNQVSLWCMVKGFYPSDIA |
| | VEWESNGQPENNYKTTPPVLDSDGSFFLYSKLTVDKSRWQQGNVFSCSVMH |
| | EALHNHYTQKSLSLSPGKGGGSGGGSGGGSGGGSGSTGEVQLVESGGGLVQP |
| | GGSLRLSCAASGF [symbol] HWVRQAPGKGLEWVA [symbol] YADSVKG |
| | RFTISADTSKNTAYLQMNSLRAEDTAVYYCAR [symbol] DYWGQGTLVT |
| | VSSASTKGPSVFPLAPSSKSTSGGTAALGCLVKDYFPEPVTVSWNSGALTSGV |
| | HTFPAVLQSSGLYSLSSVVTVPSSSLGTQTYICNVNHKPSNTKVDKKVEPKSC |
| | DKTHT (SEQ ID NO: 910) |
| Hole Hc | MNLLLILTFVAAAVAEVQLVESGGGLVQPGGSLRLSCAASGF [symbol] HWVR |
| construct | QAPGKGLEWVA [symbol] YADSVKGRFTISADTSKNTAYLQMNSLRAEDT |
| | AVYYCAR [symbol] DYWGQGTLVTVSSGGGGSDIQMTQSPSSLSASVGDRVTIT |
| | CRASQ [symbol] VAWYQQKPGKAPKLLIY [symbol] GVPSRFSGSRSGTDFTLTIS |
| | SLQPEDFATYYCQQ [symbol] TFGQGTKVEIKGGGGSGGGGSEPKSSDKTHTC |
| | PPCPAPELLGGPSVFLFPPKPKDTLMISRTPEVTCVVVAVSHEDPEVKFNWYV |
| | DGVEVHNAKTKPREEQYGSTYRVVSVLTVLHQDWLNGKEYKCKVSNKALP |
| | APIEKTISKAKGQPREPQVYTLPPIRELMTSNQVSLSCAVKGFYPSDIAVEWES |
| | NGQPENNYKTTPPVLDSDGSFFLVSKLTVDKSRWQQGNVFSCSVMHEALHN |
| | HYTQKSLSLSPGKGGGSGGGSGGGSGGGSGSTGEVQLVESGGGLVQPGGSLR |
| | LSCAASGF [symbol] HWVRQAPGKGLEWVA [symbol] YADSVKGRFTISA |
| | DTSKNTAYLQMNSLRAEDTAVYYCAR [symbol] DYWGQGTLVTVSSAST |
| | KGPSVFPLAPSSKSTSGGTAALGCLVKDYFPEPVTVSWNSGALTSGVHTFPAV |
| | LQSSGLYSLSSVVTVPSSSLGTQTYICNVNHKPSNTKVDKKVEPKSCDKTHT |
| | (SEQ ID NO: 911) |
| Light | MNLLLILTFVAAAVADIQMTQSPSSLSASVGDRVTITCRASQ [symbol] WYQQ |
| Chain | KPGKAPKLLIY [symbol] GVPSRFSGSRSGTDFTLTISSLQPEDFATYYCQQ [symbol] |
| | [symbol] TFGQGTKVEIKRTVAAPSVFIFPPSDEQLKSGTASVVCLLNNFYPREAKVQ |
| | WKVDNALQSGNSQESVTEQDSKDSTYSLSSTLTLSKADYEKHKVYACEVTH |
| | QGLSSPVTKSFNRGEC (SEQ ID NO: 912) |

FZD5-LRP6 ANT 59

| | |
|---|---|
| Knob Hc | EVQLVESGGGLVQPGGSLRLSCAASGF [symbol] HWVRQAPGKGLEWVA [symbol] |
| construct | [symbol] YADSVKGRFTISADTSKNTAYLQMNSLRAEDTAVYYCAR [symbol] |
| | [symbol] DYWGQGTLVTVSSGGGGSDIQMTQSPSSLSASVGDRVTITCRASQ [symbol] V |
| | AWYQQKPGKAPKLLIY [symbol] GVPSRFSGSRSGTDFTLTISSLQPEDFATYYC |
| | QQ [symbol] TFGQGTKVEIKGGGGSGGGGSEPKTSDKTHTCPPCPAPELLGGPSVF |
| | LFPPKPKDTLMISRTPEVTCVVVAVSHEDPEVKFNWYVDGVEVHNAKTKPREE |
| | QYGSTYRVVSVLTVLHQDWLNGKEYKCKVSNKALPAPIEKTISKAKGQPREPM |
| | VFDLPPSREEMTKNQVSLWCMVKGFYPSDIAVEWESNGQPENNYKTTPPVLDS |
| | DGSFFLYSKLTVDKSRWQQGNVFSCSVMHEALHNHYTQKSLSLSPGKGGGSG |
| | GGSGGGSGGGSGSTGEVQLVESGGGLVQPGGSLRLSCAASGF [symbol] HWVR |
| | QAPGKGLEWVA [symbol] YADSVKGRFTISADTSKNTAYLQMNSLRAEDT |
| | AVYYCAR [symbol] DYWGQGTLVTVSSASTKGPSVFPLAPSSKSTSGGTAALGCLV |
| | KDYFPEPVTVSWNSGALTSGVHTFPAVLQSSGLYSLSSVVTVPSSSLGTQTYIC |
| | NVNHKPSNTKVDKKVEPKSCDKTHT (SEQ ID NO: 913) |
| Hole Hc | EVQLVESGGGLVQPGGSLRLSCAASGF [symbol] HWVRQAPGKGLEWVA [symbol] |
| construct | [symbol] YADSVKGRFTISADTSKNTAYLQMNSLRAEDTAVYYCAR [symbol] |
| | [symbol] DYWGQGTLVTVSSGGGGSDIQMTQSPSSLSASVGDRVTITCRASQ [symbol] |
| | [symbol] VAWYQQKPGKAPKLLIY [symbol] GVPSRFSGSRSGTDFTLTISSLQPEDFAT |
| | YYCQQ [symbol] TFGQGTKVEIKGGGGSGGGGSEPKSSDKTHTCPPCPAPELLGGP |
| | SVFLFPPKPKDTLMISRTPEVTCVVVAVSHEDPEVKFNWYVDGVEVHNAKTKP |
| | REEQYGSTYRVVSVLTVLHQDWLNGKEYKCKVSNKALPAPIEKTISKAKGQPR |
| | EPQVYTLPPIRELMTSNQVSLSCAVKGFYPSDIAVEWESNGQPENNYKTTPPVL |
| | DSDGSFFLVSKLTVDKSRWQQGNVFSCSVMHEALHNHYTQKSLSLSPGKGGG |
| | SGGGSGGGSGGGSGSTGEVQLVESGGGLVQPGGSLRLSCAASGF [symbol] HW |
| | VRQAPGKGLEWVA [symbol] YADSVKGRFTISADTSKNTAYLQMNSLRAE |
| | DTAVYYCAR [symbol] DYWGQGTLVTVSSASTKGPSVFPLAPSSKSTSGGTAALGC |
| | LVKDYFPEPVTVSWNSGALTSGVHTFPAVLQSSGLYSLSSVVTVPSSSLGTQTYI |
| | CNVNHKPSNTKVDKKVEPKSCDKTHT (SEQ ID NO: 914) |
| Light | DIQMTQSPSSLSASVGDRVTITCRASQ [symbol] VAWYQQKPGKAPKLLIY [symbol] |
| Chain | [symbol] GVPSRFSGSRSGTDFTLTISSLQPEDFATYYCQQAHYFPITFGQGTKVEIKRTV |
| | AAPSVFIFPPSDEQLKSGTASVVCLLNNFYPREAKVQWKVDNALQSGNSQESV |
| | TEQDSKDSTYSLSSTLTLSKADYEKHKVYACEVTHQGLSSPVTKSFNRGEC |
| | (SEQ ID NO: 915) |

pFZD-LRP6 ANT9

| | |
|---|---|
| Knob Hc | EVQLVESGGGLVQPGGSLRLSCAASGF [symbol] HWVRQAPGKGLEWVA [symbol] |
| construct | [symbol] YADSVKGRFTISADTSKNTAYLQMNSLRAEDTAVYYCAR [symbol] |
| | [symbol] DYWGQGTLVTVSSGGGGSDIQMTQSPSSLSASVGDRVTITCRASQ [symbol] |
| | VAWYQQKPGKAPKLLIY [symbol] GVPSRFSGSRSGTDFTLTISSLQPEDFATY |
| | YCQQ [symbol] TFGQGTKVEIKGGGGSGGGGSEPKTSDKTHTCPPCPAPELLGGP |
| | SVFLFPPKPKDTLMISRTPEVTCVVVAVSHEDPEVKFNWYVDGVEVHNAKTK |
| | PREEQYGSTYRVVSVLTVLHQDWLNGKEYKCKVSNKALPAPIEKTISKAKGQ |
| | PREPMVFDLPPSREEMTKNQVSLWCMVKGFYPSDIAVEWESNGQPENNYKTT |
| | PPVLDSDGSFFLYSKLTVDKSRWQQGNVFSCSVMHEALHNHYTQKSLSLSPG |
| | KGGGSGGGSGGGSGGGSGSTGEVQLVESGGGLVQPGGSLRLSCAASGF [symbol] |
| | [symbol] HWVRQAPGKGLEWVA [symbol] YADSVKGRFTISADTSKNTAYLQM |
| | NSLRAEDTAVYYCAR [symbol] DYWGQGTLVTVSSASTKGPSVFPLAPSS |
| | KSTSGGTAALGCLVKDYFPEPVTVSWNSGALTSGVHTFPAVLQSSGLYSLSSV |
| | VTVPSSSLGTQTYICNVNHKPSNTKVDKKVEPKSCDKTHT (SEQ ID NO: 916) |
| Hole Hc | EVQLVESGGGLVQPGGSLRLSCAASGF [symbol] HWVRQAPGKGLEWVA [symbol] |
| construct | [symbol] YADSVKGRFTISADTSKNTAYLQMNSLRAEDTAVYYCAR [symbol] |
| | [symbol] DYWGQGTLVTVSSGGGGSDIQMTQSPSSLSASVGDRVTITCRAS |
| | [symbol] VAWYQQKPGKAPKLLIY [symbol] GVPSRFSGSRSGTDFTLTISSLQPE |
| | DFATYYCQQ [symbol] TFGQGTKVEIKGGGGSGGGGSEPKSSDKTHTCPPCPAPE |
| | LLGGPSVFLFPPKPKDTLMISRTPEVTCVVVAVSHEDPEVKFNWYVDGVEVH |
| | NAKTKPREEQYGSTYRVVSVLTVLHQDWLNGKEYKCKVSNKALPAPIEKTIS |
| | KAKGQPREPQVYTLPPIRELMTSNQVSLSCAVKGFYPSDIAVEWESNGQPENN |
| | YKTTPPVLDSDGSFFLVSKLTVDKSRWQQGNVFSCSVMHEALHNHYTQKSLS |
| | LSPGKGGGSGGGSGGGSGGGSGSTGEVQLVESGGGLVQPGGSLRLSCAASGF |
| | [symbol] HWVRQAPGKGLEWVA [symbol] YADSVKGRFTISADTSKNTAY |
| | LQMNSLRAEDTAVYYCAR [symbol] DYWGQGTLVTVSSASTKGPSVFPL |
| | APSSKSTSGGTAALGCLVKDYFPEPVTVSWNSGALTSGVHTFPAVLQSSGLYS |
| | LSSVVTVPSSSLGTQTYICNVNHKPSNTKVDKKVEPKSCDKTHT (SEQ ID NO: |
| | 917) |
| Light | DIQMTQSPSSLSASVGDRVTITCRASQ [symbol] VAWYQQKPGKAPKLLIY [symbol] |
| Chain | [symbol] GVPSRFSGSRSGTDFTLTISSLQPEDFATYYCQQGVyLFTFGQGTKVEIKRT |
| | VAAPSVFIFPPSDEQLKSGTASVVCLLNNFYPREAKVQWKVDNALQ |
| | SGNSQESVTEQDSKDSTYSLSSTLTLSKADYEKHKVYACEVTHQGLSSPVTKS |
| | FNRGEC (SEQ ID NO: 918) |

diabody-Fc-diabody FZD4 CM0199

| | |
|---|---|
| Knob Hc | EFEVQLVESGGGLVQPGGSLRLSCAASGF [symbol] HWVRQAPGKGLEWVA |
| construct | [symbol] YADSVKGRFTISADTSKNTAYLQMNSLRAEDTAVYYCAR [symbol] |
| | [symbol] DYWGQGTLVTVSSGGGGSDIQMTQSPSSLSASVGDRVTITCRASQ [symbol] |
| | [symbol] VAWYQQKPGKAPKLLIY [symbol] GVPSRFSGSRSGTDFTLTISSLQPEDF |
| | ATYYCQQ [symbol] TFGQGTKVEIKLEDKTHTKVEPKTSDKTHTCPPCPAPELLG |
| | GPSVFLFPPKPKDTLMISRTPEVTCVVVDVSHEDPEVKFNWYVDGVEVHNAK |
| | TKPREEQYNSTYRVVSVLTVLHQDWLNGKEYKCKVSNKALPAPIEKTISKAK |
| | GQPREPMVFDLPPSREEMTKNQVSLWCMVKGFYPSDIAVEWESNGQPENNY |
| | KTTPPVLDSDGSFFLYSKLTVDKSRWQQGNVFSCSVMHEALHNHYTQKSLSL |
| | SPGKSGSETPGTSESATPESGGGEVQLVESGGGLVQPGGSLRLSCAASGF [symbol] |
| | [symbol] HWVRQAPGKGLEWVA [symbol] YADSVKGRFTISADTSKNTAYLQMN |
| | SLRAEDTAVYYCAR [symbol] [symbol] DYWGQGTLVTVSSGGGGSD |
| | IQMTQSPSSLSASVGDRVTITCRASQ [symbol] VAWYQQKPGKAPKLLIY [symbol] |
| | [symbol] GVPSRFSGSRSGTDFTLTISSLQPEDFATYYCQQ [symbol] TFGQGTKVEIK |
| | (SEQ ID NO: 919) |
| Hole Hc | EFEVQLVESGGGLVQPGGSLRLSCAASGF [symbol] HWVRQAPGKGLEWV [symbol] |
| construct | [symbol] YADSVKGRFTISADTSKNTAYLQMNSLRAEDTAVYYCAR [symbol] |
| | [symbol] DYWGQGTLVTVSSGGGGSDIQMTQSPSSLSASVGDRVTITCRASQ [symbol] |
| | [symbol] VAWYQQKPGKAPKLLIY [symbol] GVPSRFSGSRSGTDFTLTISSLQPEDF |
| | ATYYCQQ [symbol] TFGQGTKVEIKLEDKTHTKVEPKSSDKTHNCPPCPAPELLG |
| | GPSVFLFPPKPKDTLMISRTPEVTCVVVDVSHEDPEVKFNWYVDGVEVHNAK |
| | TKPREEQYNSTYRVVSVLTVLHQDWLNGKEYKCKVSNKALPAPIEKTISKAK |
| | GQPREPQVYTLPPIRELMTSNQVSLSCAVKGFYPSDIAVEWESNGQPENNYKT |
| | TPPVLDSDGSFFLVSKLTVDKSRWQQGNVFSCSVMHEALHNHYTQKSLSLSP |
| | GKSGSETPGTSESATPESGGGEVQLVESGGGLVQPGGSLRLSCAASGF [symbol] |
| | [symbol] HWVRQAPGKGLEWVA [symbol] YADSVKGRFTISADTSKNTAYLQMNS |
| | LRAEDTAVYYCAR [symbol] DYWGQGTLVTVSSGGGGSDIQMTQSPS |
| | SLSASVGDRVTITCRASQ [symbol] VAWYQQKPGKAPKLLIY [symbol] GVPSRFS |
| | GSRSGTDFTLTISSLQPEDFATYYCQQ [symbol] TFGQGTKVEIK (SEQ ID NO: |
| | 920) |

TABLE 19
Diabody-Fc-Fab and IgG-Diabody amino acid sequences of the “heavy chain”
hole construct, “heavy chain” knob construct and the “light chain”
construct of the FZD4 Agonists, ANT39 and ANT42, and ANT39i and ANT42i
having Fc domain amino acid mutations DANG, LALAPS, LALAPS and Merchant
or LALAPS and Merchant S-S. Mature sequences do not include the 5’
leader peptide. The V-region CDRs of the chains are underlined,
italicized and bolded, Fc null mutations are italicized, CH3
heterodimerisation mutations are underlined and italicized, CH3 cys
disulphide bridges are bolded, and linkers are underlined.

ANT39i HC hole DANG
MNLLLILTFVAAAVAEVQLVESGGGLVQPGGSLRLSCAASGF [symbol] HWVRQAP
GKGLEWVA [symbol] YADSVKGRFTISADTSKNTAYLQMNSLRAEDTAVYYCAR [symbol]
DYWGQGTLVTVSSASTKGPSVFPLAPSSKSTSGGTAALGCLVKDYFPE
PVTVSWNSGALTSGVHTFPAVLQSSGLYSLSSVVTVPSSSLGTQTYICNVNHKPSNTK
VDKKVEPKSCDKTHTCPPCPAPELLGGPSVFLFPPKPKDTLMISRTPEVTCVVVAVSH
EDPEVKFNWYVDGVEVHNAKTKPREEQYGSTYRVVSVLTVLHQDWLNGKEYKCK
VSNKALPAPIEKTISKAKGQPREPQVYTLPPIRELMTSNQVSLSCAVKGFYPSDIAVEW
ESNGQPENNYKTTPPVLDSDGSFFLVSKLTVDKSRWQQGNVFSCSVMHEALHNHYT
QKSLSLSPGKGGGSGGGSGGGSGGGSGSTGEVQLVESGGGLVQPGGSLRLSCAASGF [symbol]
HWVRQAPGKGLEWVA [symbol] YADSVKGRFTISADTSKNTAYLQMN
SLRAEDTAVYYCAR [symbol] DYWGQGTLVTVSSGGGGSDIQMTQSPSSLSASVGDRV
TITCRAS [symbol] VAWYQQKPGKAPKLLIY [symbol] GVPSRFSGSRSGTDFTLTISSL
QPEDFATYYCQQ [symbol] TFGQGTKVEIK* (SEQ ID NO: 921)
ANT39i HC hole LALAPS
MNLLLILTFVAAAVAEVQLVESGGGLVQPGGSLRLSCAASGF [symbol] HWVRQAP
GKGLEWVA [symbol] YADSVKGRFTISADTSKNTAYLQMNSLRAEDTAVYYCAR [symbol]
DYWGQGTLVTVSSASTKGPSVFPLAPSSKSTSGGTAALGCLVKDYFPE
PVTVSWNSGALTSGVHTFPAVLQSSGLYSLSSVVTVPSSSLGTQTYICNVNHKPSNTK
VDKKVEPKSCDKTHTCPPCPAPEAAGGPSVFLFPPKPKDTLMISRTPEVTCVVVDVSH
EDPEVKFNWYVDGVEVHNAKTKPREEQYNSTYRVVSVLTVLHQDWLNGKEYKCK
VSNKALPASIEKTISKAKGQPREPQVYTLPPIRELMTSNQVSLSCAVKGFYPSDIAVEW
ESNGQPENNYKTTPPVLDSDGSFFLVSKLTVDKSRWQQGNVFSCSVMHEALHNHYT
QKSLSLSPGKGGGSGGGSGGGSGGGSGSTGEVQLVESGGGLVQPGGSLRLSCAASGF [symbol]
HWVRQAPGKGLEWVA [symbol] YADSVKGRFTISADTSKNTAYLQMN
SLRAEDTAVYYCAR [symbol] DYWGQGTLVTVSSGGGGSDIQMTQSPSSLSASVGDRV
TITCRAS [symbol] VAWYQQKPGKAPKLLIY [symbol] SGVPSRFSGSRSGTDFTLTISSL
QPEDFATYYCQQ [symbol] TFGQGTKVEIK* (SEQ ID NO: 922)
ANT39i HC hole LALAPS Merchant
MNLLLILTFVAAAVAEVQLVESGGGLVQPGGSLRLSCAASGF [symbol] HWVRQAP
GKGLEWVA [symbol] YADSVKGRFTISADTSKNTAYLQMNSLRAEDTAVYYCAR [symbol]
DYWGQGTLVTVSSASTKGPSVFPLAPSSKSTSGGTAALGCLVKDYFPE
PVTVSWNSGALTSGVHTFPAVLQSSGLYSLSSVVTVPSSSLGTQTYICNVNHKPSNTK
VDKKVEPKSCDKTHTCPPCPAPEAAGGPSVFLFPPKPKDTLMISRTPEVTCVVVDVSH
EDPEVKFNWYVDGVEVHNAKTKPREEQYNSTYRVVSVLTVLHQDWLNGKEYKCK
VSNKALPASIEKTISKAKGQPREPQVYTLPPSREEMTKNQVSLSCAVKGFYPSDIAVE
WESNGQPENNYKTTPPVLDSDGSFFLVSKLTVDKSRWQQGNVFSCSVMHEALHNHY
TQKSLSLSPGKGGGSGGGSGGGSGGGSGSTGEVQLVESGGGLVQPGGSLRLSCAASG
F [symbol] HWVRQAPGKGLEWVA [symbol] YADSVKGRFTISADTSKNTAYLQM
NSLRAEDTAVYYCAR [symbol] DYWGQGTLVTVSSGGGGSDIQMTQSPSSLSASVGDR
VTITCRAS [symbol] VAWYQQKPGKAPKLLIY [symbol] SGVPSRFSGSRSGTDFTLTISS
LQPEDFATYYCQQ [symbol] TFGQGTKVEIK* (SEQ ID NO: 923)
ANT39i HC hole LALAPS Merchant S-S
MNLLLILTFVAAAVAEVQLVESGGGLVQPGGSLRLSCAASGF [symbol] HWVRQAP
GKGLEWVA [symbol] YADSVKGRFTISADTSKNTAYLQMNSLRAEDTAVYYCAR [symbol]
DYWGQGTLVTVSSASTKGPSVFPLAPSSKSTSGGTAALGCLVKDYFPE
PVTVSWNSGALTSGVHTFPAVLQSSGLYSLSSVVTVPSSSLGTQTYICNVNHKPSNTK
VDKKVEPKSCDKTHTCPPCPAPEAAGGPSVFLFPPKPKDTLMISRTPEVTCVVVDVSH
EDPEVKFNWYVDGVEVHNAKTKPREEQYNSTYRVVSVLTVLHQDWLNGKEYKCK
VSNKALPASIEKTISKAKGQPREPQVCTLPPSREEMTKNQVSLSCAVKGFYPSDIAVE
WESNGQPENNYKTTPPVLDSDGSFFLVSKLTVDKSRWQQGNVFSCSVMHEALHNHY
TQKSLSLSPGKGGGSGGGSGGGSGGGSGSTGEVQLVESGGGLVQPGGSLRLSCAASG
F [symbol] HWVRQAPGKGLEWVA [symbol] YADSVKGRFTISADTSKNTAYLQM
NSLRAEDTAVYYCAR [symbol] DYWGQGTLVTVSSGGGGSDIQMTQSPSSLSASVGDR
VTITCRAS [symbol] VAWYQQKPGKAPKLLIY [symbol] SGVPSRFSGSRSGTDFTLTISS
LQPEDFATYYCQQ [symbol] TFGQGTKVEIK* (SEQ ID NO: 924)
Mature ANT39i HC hole DANG
EVQLVESGGGLVQPGGSLRLSCAASGF [symbol] HWVRQAPGKGLEWVA [symbol] [symbol]
YADSVKGRFTISADTSKNTAYLQMNSLRAEDTAVYYCAR [symbol] DYWGQ
GTLVTVSSASTKGPSVFPLAPSSKSTSGGTAALGCLVKDYFPEPVTVSWNSGALTSG
VHTFPAVLQSSGLYSLSSVVTVPSSSLGTQTYICNVNHKPSNTKVDKKVEPKSCDKT
HTCPPCPAPELLGGPSVFLFPPKPKDTLMISRTPEVTCVVVAVSHEDPEVKFNWYVDG
VEVHNAKTKPREEQYGSTYRVVSVLTVLHQDWLNGKEYKCKVSNKALPAPIEKTIS
KAKGQPREPQVYTLPPIRELMTSNQVSLSCAVKGFYPSDIAVEWESNGQPENNYKTTP
PVLDSDGSFFLVSKLTVDKSRWQQGNVFSCSVMHEALHNHYTQKSLSLSPGKGGGS
GGGSGGGSGGGSGSTGEVQLVESGGGLVQPGGSLRLSCAASGF [symbol] HWVRQAP
GKGLEWVASISSSYGYTYYADSVKGRFTISADTSKNTAYLQMNSLRAEDTAVYYCA
R [symbol] DYWGQGTLVTVSSGGGGSDIQMTQSPSSLSASVGDRVTITCRAS [symbol] V
AWYQQKPGKAPKLLIY [symbol] SGVPSRFSGSRSGTDFTLTISSLQPEDFATYYCQQ [symbol] [symbol]
TFGQGTKVEIK* (SEQ ID NO: 925)
Mature ANT39i HC hole LALAPS
EVQLVESGGGLVQPGGSLRLSCAASGF [symbol] HWVRQAPGKGLEWVA [symbol] [symbol]
YADSVKGRFTISADTSKNTAYLQMNSLRAEDTAVYYCAR [symbol] DYWGQ
GTLVTVSSASTKGPSVFPLAPSSKSTSGGTAALGCLVKDYFPEPVTVSWNSGALTSG
VHTFPAVLQSSGLYSLSSVVTVPSSSLGTQTYICNVNHKPSNTKVDKKVEPKSCDKT
HTCPPCPAPEAAGGPSVFLFPPKPKDTLMISRTPEVTCVVVDVSHEDPEVKFNWYVD
GVEVHNAKTKPREEQYNSTYRVVSVLTVLHQDWLNGKEYKCKVSNKALPASIEKTI
SKAKGQPREPQVYTLPPIRELMTSNQVSLSCAVKGFYPSDIAVEWESNGQPENNYKTT
PPVLDSDGSFFLVSKLTVDKSRWQQGNVFSCSVMHEALHNHYTQKSLSLSPGKGGG
SGGGSGGGSGGGSGSTGEVQLVESGGGLVQPGGSLRLSCAASGF [symbol] HWVRQA
PGKGLEWVA [symbol] YADSVKGRFTISADTSKNTAYLQMNSLRAEDTAVYYCA
R [symbol] DYWGQGTLVTVSSGGGGSDIQMTQSPSSLSASVGDRVTITCRAS [symbol] V
AWYQQKPGKAPKLLIY [symbol] SGVPSRFSGSRSGTDFTLTISSLQPEDFATYYCQQ [symbol] [symbol]
TFGQGTKVEIK* (SEQ ID NO: 926)
Mature ANT39i HC hole LALAPS Merchant
EVQLVESGGGLVQPGGSLRLSCAASGF [symbol] HWVRQAPGKGLEWVA [symbol] [symbol]
YADSVKGRFTISADTSKNTAYLQMNSLRAEDTAVYYCAR [symbol] DYWGQ
GTLVTVSSASTKGPSVFPLAPSSKSTSGGTAALGCLVKDYFPEPVTVSWNSGALTSG
VHTFPAVLQSSGLYSLSSVVTVPSSSLGTQTYICNVNHKPSNTKVDKKVEPKSCDKT
HTCPPCPAPEAAGGPSVFLFPPKPKDTLMISRTPEVTCVVVDVSHEDPEVKFNWYVD
GVEVHNAKTKPREEQYNSTYRVVSVLTVLHQDWLNGKEYKCKVSNKALPASIEKTI
SKAKGQPREPQVYTLPPSREEMTKNQVSLSCAVKGFYPSDIAVEWESNGQPENNYKT
TPPVLDSDGSFFLVSKLTVDKSRWQQGNVFSCSVMHEALHNHYTQKSLSLSPGKGG
GSGGGSGGGSGGGSGSTGEVQLVESGGGLVQPGGSLRLSCAASGF [symbol] HWVRQ
APGKGLEWVA [symbol] YADSVKGRFTISADTSKNTAYLQMNSLRAEDTAVYYC
AR [symbol] DYWGQGTLVTVSSGGGGSDIQMTQSPSSLSASVGDRVTITCRAS [symbol]
VAWYQQKPGKAPKLLIY [symbol] SGVPSRFSGSRSGTDFTLTISSLQPEDFATYYCQQ
YAGAGLITFGQGTKVEIK* (SEQ ID NO: 927)
Mature ANT39i HC hole LALAPS Merchant S-S
EVQLVESGGGLVQPGGSLRLSCAASGF [symbol] HWVRQAPGKGLEWVA [symbol] [symbol]
YADSVKGRFTISADTSKNTAYLQMNSLRAEDTAVYYCAR [symbol] DYWGQ
GTLVTVSSASTKGPSVFPLAPSSKSTSGGTAALGCLVKDYFPEPVTVSWNSGALTSG
VHTFPAVLQSSGLYSLSSVVTVPSSSLGTQTYICNVNHKPSNTKVDKKVEPKSCDKT
HTCPPCPAPEAAGGPSVFLFPPKPKDTLMISRTPEVTCVVVDVSHEDPEVKFNWYVD
GVEVHNAKTKPREEQYNSTYRVVSVLTVLHQDWLNGKEYKCKVSNKALPASIEKTI
SKAKGQPREPQVCTLPPSREEMTKNQVSLSCAVKGFYPSDIAVEWESNGQPENNYKT
TPPVLDSDGSFFLVSKLTVDKSRWQQGNVFSCSVMHEALHNHYTQKSLSLSPGKGG
GSGGGSGGGSGGGSGSTGEVQLVESGGGLVQPGGSLRLSCAASGF [symbol] HWVRQ
APGKGLEWVA [symbol] YADSVKGRFTISADTSKNTAYLQMNSLRAEDTAVYYC
AR [symbol] DYWGQGTLVTVSSGGGGSDIQMTQSPSSLSASVGDRVTITCRAS [symbol]
VAWYQQKPGKAPKLLIY [symbol] SGVPSRFSGSRSGTDFTLTISSLQPEDFATYYCQQ [symbol]
TFGQGTKVEIK* (SEQ ID NO: 928)
ANT39i HC knob DANG
MNLLLILTFVAAAVAEVQLVESGGGLVQPGGSLRLSCAASGF [symbol] HWVRQAP
GKGLEWVA [symbol] YADSVKGRFTISADTSKNTAYLQMNSLRAEDTAVYYCAR [symbol]
DYWGQGTLVTVSSASTKGPSVFPLAPSSKSTSGGTAALGCLVKDYFPE
PVTVSWNSGALTSGVHTFPAVLQSSGLYSLSSVVTVPSSSLGTQTYICNVNHKPSNTK
VDKKVEPKSCDKTHTCPPCPAPELLGGPSVFLFPPKPKDTLMISRTPEVTCVVVAVSH
EDPEVKFNWYVDGVEVHNAKTKPREEQYGSTYRVVSVLTVLHQDWLNGKEYKCK
VSNKALPAPIEKTISKAKGQPREPMVFDLPPSREEMTKNQVSLWCMVKGFYPSDIAV
EWESNGQPENNYKTTPPVLDSDGSFFLYSKLTVDKSRWQQGNVFSCSVMHEALHNH
YTQKSLSLSPGKGGGSGGGSGGGSGGGSGSTGEVQLVESGGGLVQPGGSLRLSCAAS
GF [symbol] HWVRQAPGKGLEWVA [symbol] YADSVKGRFTISADTSKNTAYL
QMNSLRAEDTAVYYCAR [symbol] DYWGQGTLVTVSSGGGGSDIQMTQSPSSLSAS
VGDRVTITCRAS [symbol] VAWYQQKPGKAPKLLIY [symbol] SGVPSRFSGSRSGTDFT
LTISSLQPEDFATYYCQQ [symbol] TFGQGTKVEIK* (SEQ ID NO: 929)
ANT39i HC Knob LALAPS
MNLLLILTFVAAAVAEVQLVESGGGLVQPGGSLRLSCAASGF [symbol] HWVRQAP
GKGLEWVA [symbol] YADSVKGRFTISADTSKNTAYLQMNSLRAEDTAVYYCAR [symbol]
DYWGQGTLVTVSSASTKGPSVFPLAPSSKSTSGGTAALGCLVKDYFPE
PVTVSWNSGALTSGVHTFPAVLQSSGLYSLSSVVTVPSSSLGTQTYICNVNHKPSNTK
VDKKVEPKSCDKTHTCPPCPAPEAAGGPSVFLFPPKPKDTLMISRTPEVTCVVVDVSH
EDPEVKFNWYVDGVEVHNAKTKPREEQYNSTYRVVSVLTVLHQDWLNGKEYKCK
VSNKALPASIEKTISKAKGQPREPMVFDLPPSREEMTKNQVSLWCMVKGFYPSDIAVE
WESNGQPENNYKTTPPVLDSDGSFFLYSKLTVDKSRWQQGNVFSCSVMHEALHNH
YTQKSLSLSPGKGGGSGGGSGGGSGGGSGSTGEVQLVESGGGLVQPGGSLRLSCAAS
GF [symbol] HWVRQAPGKGLEWVA [symbol] YADSVKGRFTISADTSKNTAYL
QMNSLRAEDTAVYYCAR [symbol] DYWGQGTLVTVSSGGGGSDIQMTQSPSSLSAS
VGDRVTITCRAS [symbol] VAWYQQKPGKAPKLLIY [symbol] SGVPSRFSGSRSGTDFT
LTISSLQPEDFATYYCQQ [symbol] TFGQGTKVEIK* (SEQ ID NO: 930)
ANT39i HC Knob LALAPS Merchant
MNLLLILTFVAAAVAEVQLVESGGGLVQPGGSLRLSCAASGF [symbol] HWVRQAP
GKGLEWVA [symbol] YADSVKGRFTISADTSKNTAYLQMNSLRAEDTAVYYCAR [symbol]
DYWGQGTLVTVSSASTKGPSVFPLAPSSKSTSGGTAALGCLVKDYFPE
PVTVSWNSGALTSGVHTFPAVLQSSGLYSLSSVVTVPSSSLGTQTYICNVNHKPSNTK
VDKKVEPKSCDKTHTCPPCPAPEAAGGPSVFLFPPKPKDTLMISRTPEVTCVVVDVSH
EDPEVKFNWYVDGVEVHNAKTKPREEQYNSTYRVVSVLTVLHQDWLNGKEYKCK
VSNKALPASIEKTISKAKGQPREPQVYTLPPSREEMTKNQVSLWCLVKGFYPSDIAVE
WESNGQPENNYKTTPPVLDSDGSFFLYSKLTVDKSRWQQGNVFSCSVMHEALHNH
YTQKSLSLSPGKGGGSGGGSGGGSGGGSGSTGEVQLVESGGGLVQPGGSLRLSCAAS
GF [symbol] HWVRQAPGKGLEWVA [symbol] YADSVKGRFTISADTSKNTAYL
QMNSLRAEDTAVYYCAR [symbol] DYWGQGTLVTVSSGGGGSDIQMTQSPSSLSAS
VGDRVTITCRAS [symbol] VAWYQQKPGKAPKLLIY [symbol] SGVPSRFSGSRSGTDFT
LTISSLQPEDFATYYCQQ [symbol] TFGQGTKVEIK* (SEQ ID NO: 931)
ANT39i HC Knob LALAPS Merchant S-S
MNLLLILTFVAAAVAEVQLVESGGGLVQPGGSLRLSCAASGF [symbol] HWVRQAP
GKGLEWVA [symbol] YADSVKGRFTISADTSKNTAYLQMNSLRAEDTAVYYCAR [symbol]
DYWGQGTLVTVSSASTKGPSVFPLAPSSKSTSGGTAALGCLVKDYFPE
PVTVSWNSGALTSGVHTFPAVLQSSGLYSLSSVVTVPSSSLGTQTYICNVNHKPSNTK
VDKKVEPKSCDKTHTCPPCPAPEAAGGPSVFLFPPKPKDTLMISRTPEVTCVVVDVSH
EDPEVKFNWYVDGVEVHNAKTKPREEQYNSTYRVVSVLTVLHQDWLNGKEYKCK
VSNKALPASIEKTISKAKGQPREPQVYTLPPCREEMTKNQVSLWCLVKGFYPSDIAVE
WESNGQPENNYKTTPPVLDSDGSFFLYSKLTVDKSRWQQGNVFSCSVMHEALHNH
YTQKSLSLSPGKGGGSGGGSGGGSGGGSGSTGEVQLVESGGGLVQPGGSLRLSCAAS
GF [symbol] HWVRQAPGKGLEWVA [symbol] YADSVKGRFTISADTSKNTAYL
QMNSLRAEDTAVYYCAR [symbol] DYWGQGTLVTVSSGGGGSDIQMTQSPSSLSAS
VGDRVTITCRAS [symbol] VAWYQQKPGKAPKLLIY [symbol] SGVPSRFSGSRSGTDFT
LTISSLQPEDFATYYCQQ [symbol] TFGQGTKVEIK* (SEQ ID NO: 932)
Mature ANT39i HC knob DANG
EVQLVESGGGLVQPGGSLRLSCAASGF [symbol] HWVRQAPGKGLEWVA [symbol] [symbol]
YADSVKGRFTISADTSKNTAYLQMNSLRAEDTAVYYCAR [symbol] DYWGQ
GTLVTVSSASTKGPSVFPLAPSSKSTSGGTAALGCLVKDYFPEPVTVSWNSGALTSG
VHTFPAVLQSSGLYSLSSVVTVPSSSLGTQTYICNVNHKPSNTKVDKKVEPKSCDKT
HTCPPCPAPELLGGPSVFLFPPKPKDTLMISRTPEVTCVVVAVSHEDPEVKFNWYVDG
VEVHNAKTKPREEQYGSTYRVVSVLTVLHQDWLNGKEYKCKVSNKALPAPIEKTIS
KAKGQPREPMVFDLPPSREEMTKNQVSLWCMVKGFYPSDIAVEWESNGQPENNYKT
TPPVLDSDGSFFLYSKLTVDKSRWQQGNVFSCSVMHEALHNHYTQKSLSLSPGKGG
GSGGGSGGGSGGGSGSTGEVQLVESGGGLVQPGGSLRLSCAASGF [symbol] HWV
RQAPGKGLEWVA [symbol] YADSVKGRFTISADTSKNTAYLQMNSLRAEDTAV
YYCAR [symbol] DYWGQGTLVTVSSGGGGSDIQMTQSPSSLSASVGDRVTITCRAS [symbol] [symbol]
VAWYQQKPGKAPKLLIY [symbol] SGVPSRFSGSRSGTDFTLTISSLQPEDFATY
YCQQ [symbol] TFGQGTKVEIK* (SEQ ID NO: 933)
Mature ANT39i HC Knob LALAPS
EVQLVESGGGLVQPGGSLRLSCAASGF [symbol] HWVRQAPGKGLEWVA [symbol] [symbol]
YADSVKGRFTISADTSKNTAYLQMNSLRAEDTAVYYCAR [symbol] DYWGQ
GTLVTVSSASTKGPSVFPLAPSSKSTSGGTAALGCLVKDYFPEPVTVSWNSGALTSG
VHTFPAVLQSSGLYSLSSVVTVPSSSLGTQTYICNVNHKPSNTKVDKKVEPKSCDKT
HTCPPCPAPEAAGGPSVFLFPPKPKDTLMISRTPEVTCVVVDVSHEDPEVKFNWYVD
GVEVHNAKTKPREEQYNSTYRVVSVLTVLHQDWLNGKEYKCKVSNKALPASIEKTI
SKAKGQPREPMVFDLPPSREEMTKNQVSLWCMVKGFYPSDIAVEWESNGQPENNYK
TTPPVLDSDGSFFLYSKLTVDKSRWQQGNVFSCSVMHEALHNHYTQKSLSLSPGKG
GGSGGGSGGGSGGGSGSTGEVQLVESGGGLVQPGGSLRLSCAASGF [symbol] HW
VRQAPGKGLEWVA [symbol] YADSVKGRFTISADTSKNTAYLQMNSLRAEDTA
VYYCAR [symbol] DYWGQGTLVTVSSGGGGSDIQMTQSPSSLSASVGDRVTITCRAS [symbol]
VAWYQQKPGKAPKLLIY [symbol] SGVPSRFSGSRSGTDFTLTISSLQPEDFAT
YYCQQ [symbol] TFGQGTKVEIK* (SEQ ID NO: 934)
Mature ANT39i HC Knob LALAPS Merchant
EVQLVESGGGLVQPGGSLRLSCAASGF [symbol] HWVRQAPGKGLEWVA [symbol] [symbol]
YADSVKGRFTISADTSKNTAYLQMNSLRAEDTAVYYCAR [symbol] DYWGQ
GTLVTVSSASTKGPSVFPLAPSSKSTSGGTAALGCLVKDYFPEPVTVSWNSGALTSG
VHTFPAVLQSSGLYSLSSVVTVPSSSLGTQTYICNVNHKPSNTKVDKKVEPKSCDKT
HTCPPCPAPEAAGGPSVFLFPPKPKDTLMISRTPEVTCVVVDVSHEDPEVKFNWYVD
GVEVHNAKTKPREEQYNSTYRVVSVLTVLHQDWLNGKEYKCKVSNKALPASIEKTI
SKAKGQPREPQVYTLPPSREEMTKNQVSLWCLVKGFYPSDIAVEWESNGQPENNYK
TTPPVLDSDGSFFLYSKLTVDKSRWQQGNVFSCSVMHEALHNHYTQKSLSLSPGKG
GGSGGGSGGGSGGGSGSTGEVQLVESGGGLVQPGGSLRLSCAASGF [symbol] HW
VRQAPGKGLEWVA [symbol] YADSVKGRFTISADTSKNTAYLQMNSLRAEDTA
VYYCAR [symbol] DYWGQGTLVTVSSGGGGSDIQMTQSPSSLSASVGDRVTITCRAS [symbol]
VAWYQQKPGKAPKLLIY [symbol] SGVPSRFSGSRSGTDFTLTISSLQPEDFAT
YYCQQ [symbol] TFGQGTKVEIK* (SEQ ID NO: 935)
Mature ANT39i HC Knob LALAPS Merchant S-S
EVQLVESGGGLVQPGGSLRLSCAASGF [symbol] HWVRQAPGKGLEWVA [symbol] [symbol]
YADSVKGRFTISADTSKNTAYLQMNSLRAEDTAVYYCAR [symbol] DYWGQ
GTLVTVSSASTKGPSVFPLAPSSKSTSGGTAALGCLVKDYFPEPVTVSWNSGALTSG
VHTFPAVLQSSGLYSLSSVVTVPSSSLGTQTYICNVNHKPSNTKVDKKVEPKSCDKT
HTCPPCPAPEAAGGPSVFLFPPKPKDTLMISRTPEVTCVVVDVSHEDPEVKFNWYVD
GVEVHNAKTKPREEQYNSTYRVVSVLTVLHQDWLNGKEYKCKVSNKALPASIEKTI
SKAKGQPREPQVYTLPPCREEMTKNQVSLWCLVKGFYPSDIAVEWESNGQPENNYK
TTPPVLDSDGSFFLYSKLTVDKSRWQQGNVFSCSVMHEALHNHYTQKSLSLSPGKG
GGSGGGSGGGSGGGSGSTGEVQLVESGGGLVQPGGSLRLSCAASGF [symbol] HW
VRQAPGKGLEWVA [symbol] YADSVKGRFTISADTSKNTAYLQMNSLRAEDTA
VYYCAR [symbol] DYWGQGTLVTVSSGGGGSDIQMTQSPSSLSASVGDRVTITCRAS [symbol]
VAWYQQKPGKAPKLLIY [symbol] SGVPSRFSGSRSGTDFTLTISSLQPEDFAT
YYCQQ [symbol] TFGQGTKVEIK* (SEQ ID NO: 936)
ANT39 Hc Hole DANG
MNLLLILTFVAAAVAEVQLVESGGGLVQPGGSLRLSCAASGF [symbol] HWVRQAPG
KGLEWVA [symbol] YADSVKGRFTISADTSKNTAYLQMNSLRAEDTAVYYCAR [symbol] [symbol]
DYWGQGTLVTVSSGGGGSDIQMTQSPSSLSASVGDRVTITCRAS [symbol] VAW
YQQKPGKAPKLLIY [symbol] SGVPSRFSGSRSGTDFTLTISSLQPEDFATYYCQQ [symbol] [symbol]
TFGQGTKVEIKGGGGSGGGGSEPKSSDKTHTCPPCPAPELLGGPSVFLFPPKPKD
TLMISRTPEVTCVVVAVSHEDPEVKFNWYVDGVEVHNAKTKPREEQYGSTYRVVSV
LTVLHQDWLNGKEYKCKVSNKALPAPIEKTISKAKGQPREPQVYTLPPIRELMTSNQ
VSLSCAVKGFYPSDIAVEWESNGQPENNYKTTPPVLDSDGSFFLVSKLTVDKSRWQQ
GNVFSCSVMHEALHNHYTQKSLSLSPGKGGGSGGGSGGGSGGGSGSTGEVQLVESG
GGLVQPGGSLRLSCAASGF [symbol] HWVRQAPGKGLEWVA [symbol] YADSVK
GRFTISADTSKNTAYLQMNSLRAEDTAVYYCAR [symbol] DYWGQGTLVTVSSA
STKGPSVFPLAPSSKSTSGGTAALGCLVKDYFPEPVTVSWNSGALTSGVHTFPAVLQS
SGLYSLSSVVTVPSSSLGTQTYICNVNHKPSNTKVDKKVEPKSCDKTHT* (SEQ ID
NO: 908)
ANT39 Hc Hole LALAPS
MNLLLILTFVAAAVAEVQLVESGGGLVQPGGSLRLSCAASGF [symbol] HWVRQAPG
KGLEWVA [symbol] YADSVKGRFTISADTSKNTAYLQMNSLRAEDTAVYYCAR [symbol] [symbol]
DYWGQGTLVTVSSGGGGSDIQMTQSPSSLSASVGDRVTITCRAS [symbol] VAW
YQQKPGKAPKLLIY [symbol] SGVPSRFSGSRSGTDFTLTISSLQPEDFATYYCQQ [symbol] [symbol]
TFGQGTKVEIKGGGGSGGGGSEPKSSDKTHTCPPCPAPEAAGGPSVFLFPPKPKD
TLMISRTPEVTCVVVDVSHEDPEVKFNWYVDGVEVHNAKTKPREEQYNSTYRVVSV
LTVLHQDWLNGKEYKCKVSNKALPASIEKTISKAKGQPREPQVYTLPPIRELMTSNQ
VSLSCAVKGFYPSDIAVEWESNGQPENNYKTTPPVLDSDGSFFLVSKLTVDKSRWQQ
GNVFSCSVMHEALHNHYTQKSLSLSPGKGGGSGGGSGGGSGGGSGSTGEVQLVESG
GGLVQPGGSLRLSCAASGF [symbol] HWVRQAPGKGLEWVA [symbol] YADSVK
GRFTISADTSKNTAYLQMNSLRAEDTAVYYCAR [symbol] DYWGQGTLVTVSSA
STKGPSVFPLAPSSKSTSGGTAALGCLVKDYFPEPVTVSWNSGALTSGVHTFPAVLQS
SGLYSLSSVVTVPSSSLGTQTYICNVNHKPSNTKVDKKVEPKSCDKTHT* (SEQ ID
NO: 937)
ANT39 Hc Hole LALAPS Merchant
MNLLLILTFVAAAVAEVQLVESGGGLVQPGGSLRLSCAASGF [symbol] HWVRQAPG
KGLEWVA [symbol] YADSVKGRFTISADTSKNTAYLQMNSLRAEDTAVYYCAR [symbol] [symbol]
DYWGQGTLVTVSSGGGGSDIQMTQSPSSLSASVGDRVTITCRAS [symbol] VAW
YQQKPGKAPKLLIY [symbol] SGVPSRFSGSRSGTDFTLTISSLQPEDFATYYCQQ [symbol] [symbol]
TFGQGTKVEIKGGGGSGGGGSEPKSSDKTHTCPPCPAPEAAGGPSVFLFPPKPKD
TLMISRTPEVTCVVVDVSHEDPEVKFNWYVDGVEVHNAKTKPREEQYNSTYRVVSV
LTVLHQDWLNGKEYKCKVSNKALPASIEKTISKAKGQPREPQVYTLPPSREEMTKNQ
VSLSCAVKGFYPSDIAVEWESNGQPENNYKTTPPVLDSDGSFFLVSKLTVDKSRWQQ
GNVFSCSVMHEALHNHYTQKSLSLSPGKGGGSGGGSGGGSGGGSGSTGEVQLVESG
GGLVQPGGSLRLSCAASGF [symbol] HWVRQAPGKGLEWVA [symbol] YADSVK
GRFTISADTSKNTAYLQMNSLRAEDTAVYYCAR [symbol] DYWGQGTLVTVSSA
STKGPSVFPLAPSSKSTSGGTAALGCLVKDYFPEPVTVSWNSGALTSGVHTFPAVLQS
SGLYSLSSVVTVPSSSLGTQTYICNVNHKPSNTKVDKKVEPKSCDKTHT* (SEQ ID
NO: 938)
ANT39 Hc Hole LALAPS Merchant S-S
MNLLLILTFVAAAVAEVQLVESGGGLVQPGGSLRLSCAASGF [symbol] HWVRQAPG
KGLEWVA [symbol] YADSVKGRFTISADTSKNTAYLQMNSLRAEDTAVYYCAR [symbol] [symbol]
DYWGQGTLVTVSSGGGGSDIQMTQSPSSLSASVGDRVTITCRAS [symbol] VAW
YQQKPGKAPKLLIY [symbol] SGVPSRFSGSRSGTDFTLTISSLQPEDFATYYCQQ [symbol] [symbol]
TFGQGTKVEIKGGGGSGGGGSEPKSSDKTHTCPPCPAPEAAGGPSVFLFPPKPKD
TLMISRTPEVTCVVVDVSHEDPEVKFNWYVDGVEVHNAKTKPREEQYNSTYRVVSV
LTVLHQDWLNGKEYKCKVSNKALPASIEKTISKAKGQPREPQVCTLPPSREEMTKNQ
VSLSCAVKGFYPSDIAVEWESNGQPENNYKTTPPVLDSDGSFFLVSKLTVDKSRWQQ
GNVFSCSVMHEALHNHYTQKSLSLSPGKGGGSGGGSGGGSGGGSGSTGEVQLVESG
GGLVQPGGSLRLSCAASGF [symbol] HWVRQAPGKGLEWVA [symbol] YADSVK
GRFTISADTSKNTAYLQMNSLRAEDTAVYYCAR [symbol] DYWGQGTLVTVSSA
STKGPSVFPLAPSSKSTSGGTAALGCLVKDYFPEPVTVSWNSGALTSGVHTFPAVLQS
SGLYSLSSVVTVPSSSLGTQTYICNVNHKPSNTKVDKKVEPKSCDKTHT* (SEQ ID
NO: 939)
Mature ANT39 Hc Hole DANG
EVQLVESGGGLVQPGGSLRLSCAASGF [symbol] HWVRQAPGKGLEWVA [symbol] [symbol]
YADSVKGRFTISADTSKNTAYLQMNSLRAEDTAVYYCAR [symbol] DYWGQGTLVT
VSSGGGGSDIQMTQSPSSLSASVGDRVTITCRAS [symbol] VAWYQQKPGKAPKLLIY [symbol] [symbol]
SGVPSRFSGSRSGTDFTLTISSLQPEDFATYYCQQ [symbol] TFGQGTKVEIKG
GGGSGGGGSEPKSSDKTHTCPPCPAPELLGGPSVFLFPPKPKDTLMISRTPEVTCVVV
AVSHEDPEVKFNWYVDGVEVHNAKTKPREEQYGSTYRVVSVLTVLHQDWLNGKEY
KCKVSNKALPAPIEKTISKAKGQPREPQVYTLPPIRELMTSNQVSLSCAVKGFYPSDIA
VEWESNGQPENNYKTTPPVLDSDGSFFLVSKLTVDKSRWQQGNVFSCSVMHEALHN
HYTQKSLSLSPGKGGGSGGGSGGGSGGGSGSTGEVQLVESGGGLVQPGGSLRLSCA
ASGF [symbol] HWVRQAPGKGLEWVA [symbol] YADSVKGRFTISADTSKNTAY
LQMNSLRAEDTAVYYCAR [symbol] DYWGQGTLVTVSSASTKGPSVFPLAPSSKS
TSGGTAALGCLVKDYFPEPVTVSWNSGALTSGVHTFPAVLQSSGLYSLSSVVTVPSS
SLGTQTYICNVNHKPSNTKVDKKVEPKSCDKTHT* (SEQ ID NO: 940)
Mature ANT39 Hc Hole LALAPS
EVQLVESGGGLVQPGGSLRLSCAASGF [symbol] HWVRQAPGKGLEWVA [symbol] [symbol]
YADSVKGRFTISADTSKNTAYLQMNSLRAEDTAVYYCAR [symbol] DYWGQGTLVT
VSSGGGGSDIQMTQSPSSLSASVGDRVTITCRAS [symbol] VAWYQQKPGKAPKLLIY [symbol] [symbol]
SGVPSRFSGSRSGTDFTLTISSLQPEDFATYYCQQ [symbol] TFGQGTKVEIKG
GGGSGGGGSEPKSSDKTHTCPPCPAPEAAGGPSVFLFPPKPKDTLMISRTPEVTCVVV
DVSHEDPEVKFNWYVDGVEVHNAKTKPREEQYNSTYRVVSVLTVLHQDWLNGKE
YKCKVSNKALPASIEKTISKAKGQPREPQVYTLPPIRELMTSNQVSLSCAVKGFYPSDI
AVEWESNGQPENNYKTTPPVLDSDGSFFLVSKLTVDKSRWQQGNVFSCSVMHEALH
NHYTQKSLSLSPGKGGGSGGGSGGGSGGGSGSTGEVQLVESGGGLVQPGGSLRLSC
AASGF [symbol] HWVRQAPGKGLEWVA [symbol] YADSVKGRFTISADTSKNTA
YLQMNSLRAEDTAVYYCAR [symbol] DYWGQGTLVTVSSASTKGPSVFPLAPSS
KSTSGGTAALGCLVKDYFPEPVTVSWNSGALTSGVHTFPAVLQSSGLYSLSSVVTVP
SSSLGTQTYICNVNHKPSNTKVDKKVEPKSCDKTHT* (SEQ ID NO: 941)
Mature ANT39 Hc Hole LALAPS Merchant
EVQLVESGGGLVQPGGSLRLSCAASGF [symbol] HWVRQAPGKGLEWVA [symbol] [symbol]
YADSVKGRFTISADTSKNTAYLQMNSLRAEDTAVYYCAR [symbol] DYWGQGTLVT
VSSGGGGSDIQMTQSPSSLSASVGDRVTITCRAS [symbol] VAWYQQKPGKAPKLLIY [symbol] [symbol]
SGVPSRFSGSRSGTDFTLTISSLQPEDFATYYCQQ [symbol] TFGQGTKVEIKG
GGGSGGGGSEPKSSDKTHTCPPCPAPEAAGGPSVFLFPPKPKDTLMISRTPEVTCVVV
DVSHEDPEVKFNWYVDGVEVHNAKTKPREEQYNSTYRVVSVLTVLHQDWLNGKE
YKCKVSNKALPASIEKTISKAKGQPREPQVYTLPPSREEMTKNQVSLSCAVKGFYPSD
IAVEWESNGQPENNYKTTPPVLDSDGSFFLVSKLTVDKSRWQQGNVFSCSVMHEAL
HNHYTQKSLSLSPGKGGGSGGGSGGGSGGGSGSTGEVQLVESGGGLVQPGGSLRLS
CAASGF [symbol] HWVRQAPGKGLEWVA [symbol] YADSVKGRFTISADTSKNT
AYLQMNSLRAEDTAVYYCAR [symbol] DYWGQGTLVTVSSASTKGPSVFPLAPS
SKSTSGGTAALGCLVKDYFPEPVTVSWNSGALTSGVHTFPAVLQSSGLYSLSSVVTV
PSSSLGTQTYICNVNHKPSNTKVDKKVEPKSCDKTHT* (SEQ ID NO: 942)
Mature ANT39 Hc Hole LALAPS Merchant S-S
EVQLVESGGGLVQPGGSLRLSCAASGF [symbol] HWVRQAPGKGLEWVA [symbol] [symbol]
YADSVKGRFTISADTSKNTAYLQMNSLRAEDTAVYYCAR [symbol] DYWGQGTLVT
VSSGGGGSDIQMTQSPSSLSASVGDRVTITCRAS [symbol] VAWYQQKPGKAPKLLIY [symbol] [symbol]
SGVPSRFSGSRSGTDFTLTISSLQPEDFATYYCQQ [symbol] TFGQGTKVEIKG
GGGSGGGGSEPKSSDKTHTCPPCPAPEAAGGPSVFLFPPKPKDTLMISRTPEVTCVVV
DVSHEDPEVKFNWYVDGVEVHNAKTKPREEQYNSTYRVVSVLTVLHQDWLNGKE
YKCKVSNKALPASIEKTISKAKGQPREPQVCTLPPSREEMTKNQVSLSCAVKGFYPSD
IAVEWESNGQPENNYKTTPPVLDSDGSFFLVSKLTVDKSRWQQGNVFSCSVMHEAL
HNHYTQKSLSLSPGKGGGSGGGSGGGSGGGSGSTGEVQLVESGGGLVQPGGSLRLS
CAASGF [symbol] HWVRQAPGKGLEWVA [symbol] YADSVKGRFTISADTSKNT
AYLQMNSLRAEDTAVYYCAR [symbol] DYWGQGTLVTVSSASTKGPSVFPLAPS
SKSTSGGTAALGCLVKDYFPEPVTVSWNSGALTSGVHTFPAVLQSSGLYSLSSVVTV
PSSSLGTQTYICNVNHKPSNTKVDKKVEPKSCDKTHT* (SEQ ID NO: 943)
ANT39 Hc knob DANG
MNLLLILTFVAAAVAEVQLVESGGGLVQPGGSLRLSCAASGF [symbol] HWVRQAP
GKGLEWVA [symbol] YADSVKGRFTISADTSKNTAYLQMNSLRAEDTAVYYCA
R [symbol] DYWGQGTLVTVSSGGGGSDIQMTQSPSSLSASVGDRVTITCRAS [symbol]
VAWYQQKPGKAPKLLIY [symbol] SGVPSRFSGSRSGTDFTLTISSLQPEDFATYYCQQ [symbol]
TFGQGTKVEIKGGGGSGGGGSEPKSSDKTHTCPPCPAPELLGGPSVFLFPP
KPKDTLMISRTPEVTCVVVAVSHEDPEVKFNWYVDGVEVHNAKTKPREEQYGSTYR
VVSVLTVLHQDWLNGKEYKCKVSNKALPAPIEKTISKAKGQPREPMVFDLPPSREEM
TKNQVSLWCMVKGFYPSDIAVEWESNGQPENNYKTTPPVLDSDGSFFLYSKLTVDKS
RWQQGNVFSCSVMHEALHNHYTQKSLSLSPGKGGGSGGGSGGGSGGGSGSTGEVQ
LVESGGGLVQPGGSLRLSCAASGF [symbol] HWVRQAPGKGLEWVA [symbol] Y
ADSVKGRFTISADTSKNTAYLQMNSLRAEDTAVYYCAR [symbol] DYWGQGTLV
TVSSASTKGPSVFPLAPSSKSTSGGTAALGCLVKDYFPEPVTVSWNSGALTSGVHTFP
AVLQSSGLYSLSSVVTVPSSSLGTQTYICNVNHKPSNTKVDKKVEPKSCDKTHT*
(SEQ ID NO: 944)
ANT39 Hc knob LALAPS
MNLLLILTFVAAAVAEVQLVESGGGLVQPGGSLRLSCAASGF [symbol] HWVRQAP
GKGLEWVA [symbol] YADSVKGRFTISADTSKNTAYLQMNSLRAEDTAVYYCA
R [symbol] DYWGQGTLVTVSSGGGGSDIQMTQSPSSLSASVGDRVTITCRAS [symbol]
VAWYQQKPGKAPKLLIY [symbol] SGVPSRFSGSRSGTDFTLTISSLQPEDFATYYCQQ [symbol]
TFGQGTKVEIKGGGGSGGGGSEPKSSDKTHTCPPCPAPEAAGGPSVFLFPP
KPKDTLMISRTPEVTCVVVDVSHEDPEVKFNWYVDGVEVHNAKTKPREEQYNSTYR
VVSVLTVLHQDWLNGKEYKCKVSNKALPASIEKTISKAKGQPREPMVFDLPPSREEM
TKNQVSLWCMVKGFYPSDIAVEWESNGQPENNYKTTPPVLDSDGSFFLYSKLTVDKS
RWQQGNVFSCSVMHEALHNHYTQKSLSLSPGKGGGSGGGSGGGSGGGSGSTGEVQ
LVESGGGLVQPGGSLRLSCAASGF [symbol] HWVRQAPGKGLEWVA [symbol] Y
ADSVKGRFTISADTSKNTAYLQMNSLRAEDTAVYYCAR [symbol] DYWGQGTLV
TVSSASTKGPSVFPLAPSSKSTSGGTAALGCLVKDYFPEPVTVSWNSGALTSGVHTFP
AVLQSSGLYSLSSVVTVPSSSLGTQTYICNVNHKPSNTKVDKKVEPKSCDKTHT*
(SEQ ID NO: 945)
ANT39 Hc knob LALAPS Merchant
MNLLLILTFVAAAVAEVQLVESGGGLVQPGGSLRLSCAASGF [symbol] HWVRQAP
GKGLEWVA [symbol] YADSVKGRFTISADTSKNTAYLQMNSLRAEDTAVYYCA
R [symbol] DYWGQGTLVTVSSGGGGSDIQMTQSPSSLSASVGDRVTITCRAS [symbol]
VAWYQQKPGKAPKLLIY [symbol] SGVPSRFSGSRSGTDFTLTISSLQPEDFATYYCQQ [symbol]
TFGQGTKVEIKGGGGSGGGGSEPKSSDKTHTCPPCPAPEAAGGPSVFLFPP
KPKDTLMISRTPEVTCVVVDVSHEDPEVKFNWYVDGVEVHNAKTKPREEQYNSTYR
VVSVLTVLHQDWLNGKEYKCKVSNKALPASIEKTISKAKGQPREPQVYTLPPSREEM
TKNQVSLWCLVKGFYPSDIAVEWESNGQPENNYKTTPPVLDSDGSFFLYSKLTVDKS
RWQQGNVFSCSVMHEALHNHYTQKSLSLSPGKGGGSGGGSGGGSGGGSGSTGEVQ
LVESGGGLVQPGGSLRLSCAASGF [symbol] HWVRQAPGKGLEWVA [symbol] Y
ADSVKGRFTISADTSKNTAYLQMNSLRAEDTAVYYCAR [symbol] DYWGQGTLV
TVSSASTKGPSVFPLAPSSKSTSGGTAALGCLVKDYFPEPVTVSWNSGALTSGVHTFP
AVLQSSGLYSLSSVVTVPSSSLGTQTYICNVNHKPSNTKVDKKVEPKSCDKTHT*
(SEQ ID NO: 946)
ANT39 Hc knob LALAPS Merchant S-S
MNLLLILTFVAAAVAEVQLVESGGGLVQPGGSLRLSCAASGF [symbol] WVRQAP
GKGLEWVA [symbol] YADSVKGRFTISADTSKNTAYLQMNSLRAEDTAVYYCA
R [symbol] DYWGQGTLVTVSSGGGGSDIQMTQSPSSLSASVGDRVTITCRAS [symbol]
VAWYQQKPGKAPKLLIY [symbol] SGVPSRFSGSRSGTDFTLTISSLQPEDFATYYCQQ [symbol]
TFGQGTKVEIKGGGGSGGGGSEPKSSDKTHTCPPCPAPEAAGGPSVFLFPP
KPKDTLMISRTPEVTCVVVDVSHEDPEVKFNWYVDGVEVHNAKTKPREEQYNSTYR
VVSVLTVLHQDWLNGKEYKCKVSNKALPASIEKTISKAKGQPREPQVYTLPPCREEM
TKNQVSLWCLVKGFYPSDIAVEWESNGQPENNYKTTPPVLDSDGSFFLYSKLTVDKS
RWQQGNVFSCSVMHEALHNHYTQKSLSLSPGKGGGSGGGSGGGSGGGSGSTGEVQ
LVESGGGLVQPGGSLRLSCAASGF [symbol] HWVRQAPGKGLEWVA [symbol] Y
ADSVKGRFTISADTSKNTAYLQMNSLRAEDTAVYYCAR [symbol] DYWGQGTLV
TVSSASTKGPSVFPLAPSSKSTSGGTAALGCLVKDYFPEPVTVSWNSGALTSGVHTFP
AVLQSSGLYSLSSVVTVPSSSLGTQTYICNVNHKPSNTKVDKKVEPKSCDKTHT*
(SEQ ID NO: 947)
Mature ANT39 Hc knob DANG
EVQLVESGGGLVQPGGSLRLSCAASGF [symbol] HWVRQAPGKGLEWVA [symbol] [symbol]
YADSVKGRFTISADTSKNTAYLQMNSLRAEDTAVYYCAR [symbol] DYWGQGT
LVTVSSGGGGSDIQMTQSPSSLSASVGDRVTITCRAS [symbol] VAWYQQKPGKAPKL
LIY [symbol] SGVPSRFSGSRSGTDFTLTISSLQPEDFATYYCQQ [symbol] TFGQGTKV
EIKGGGGSGGGGSEPKSSDKTHTCPPCPAPELLGGPSVFLFPPKPKDTLMISRTPEVTC
VVVAVSHEDPEVKFNWYVDGVEVHNAKTKPREEQYGSTYRVVSVLTVLHQDWLN
GKEYKCKVSNKALPAPIEKTISKAKGQPREPMVFDLPPSREEMTKNQVSLWCMVKGF
YPSDIAVEWESNGQPENNYKTTPPVLDSDGSFFLYSKLTVDKSRWQQGNVFSCSVM
HEALHNHYTQKSLSLSPGKGGGSGGGSGGGSGGGSGSTGEVQLVESGGGLVQPGGS
LRLSCAASGF [symbol] HWVRQAPGKGLEWVA [symbol] YADSVKGRFTISADTS
KNTAYLQMNSLRAEDTAVYYCAR [symbol] DYWGQGTLVTVSSASTKGPSVFPL
APSSKSTSGGTAALGCLVKDYFPEPVTVSWNSGALTSGVHTFPAVLQSSGLYSLSSV
VTVPSSSLGTQTYICNVNHKPSNTKVDKKVEPKSCDKTHT* (SEQ ID NO: 948)
Mature ANT39 Hc knob LALAPS
EVQLVESGGGLVQPGGSLRLSCAASGF [symbol] WVRQAPGKGLEWVA [symbol] [symbol]
YADSVKGRFTISADTSKNTAYLQMNSLRAEDTAVYYCAR [symbol] DYWGQGT
LVTVSSGGGGSDIQMTQSPSSLSASVGDRVTITCRAS [symbol] VAWYQQKPGKAPKL
LIY [symbol] SGVPSRFSGSRSGTDFTLTISSLQPEDFATYYCQQ [symbol] TFGQGTKV
EIKGGGGSGGGGSEPKSSDKTHTCPPCPAPEAAGGPSVFLFPPKPKDTLMISRTPEVTC
VWDVSHEDPEVKFNWYVDGVEVHNAKTKPREEQYNSTYRVVSVLTVLHQDWLN
GKEYKCKVSNKALPASIEKTISKAKGQPREPMVFDLPPSREEMTKNQVSLWCMVKGF
YPSDIAVEWESNGQPENNYKTTPPVLDSDGSFFLYSKLTVDKSRWQQGNVFSCSVM
HEALHNHYTQKSLSLSPGKGGGSGGGSGGGSGGGSGSTGEVQLVESGGGLVQPGGS
LRLSCAASGF [symbol] HWVRQAPGKGLEWVA [symbol] YADSVKGRFTISADTS
KNTAYLQMNSLRAEDTAVYYCAR [symbol] DYWGQGTLVTVSSASTKGPSVFPL
APSSKSTSGGTAALGCLVKDYFPEPVTVSWNSGALTSGVHTFPAVLQSSGLYSLSSV
VTVPSSSLGTQTYICNVNHKPSNTKVDKKVEPKSCDKTHT* (SEQ ID NO: 949)
Mature ANT39 Hc knob LALAPS Merchant
EVQLVESGGGLVQPGGSLRLSCAASGF [symbol] HWVRQAPGKGLEWVA [symbol] [symbol]
YADSVKGRFTISADTSKNTAYLQMNSLRAEDTAVYYCAR [symbol] DYWGQGT
LVTVSSGGGGSDIQMTQSPSSLSASVGDRVTITCRAS [symbol] VAWYQQKPGKAPKL
LIY [symbol] SGVPSRFSGSRSGTDFTLTISSLQPEDFATYYCQQ [symbol] TFGQGTKV
EIKGGGGSGGGGSEPKSSDKTHTCPPCPAPEAAGGPSVFLFPPKPKDTLMISRTPEVTC
VVVDVSHEDPEVKFNWYVDGVEVHNAKTKPREEQYNSTYRVVSVLTVLHQDWLN
GKEYKCKVSNKALPASIEKTISKAKGQPREPQVYTLPPSREEMTKNQVSLWCLVKGF
YPSDIAVEWESNGQPENNYKTTPPVLDSDGSFFLYSKLTVDKSRWQQGNVFSCSVM
HEALHNHYTQKSLSLSPGKGGGSGGGSGGGSGGGSGSTGEVQLVESGGGLVQPGGS
LRLSCAASGF [symbol] HWVRQAPGKGLEWVA [symbol] YADSVKGRFTISADTS
KNTAYLQMNSLRAEDTAVYYCAR [symbol] DYWGQGTLVTVSSASTKGPSVFPL
APSSKSTSGGTAALGCLVKDYFPEPVTVSWNSGALTSGVHTFPAVLQSSGLYSLSSV
VTVPSSSLGTQTYICNVNHKPSNTKVDKKVEPKSCDKTHT* (SEQ ID NO: 950)
Mature ANT39 Hc knob LALAPS Merchant
EVQLVESGGGLVQPGGSLRLSCAASGF [symbol] HWVRQAPGKGLEWVA [symbol] [symbol]
YADSVKGRFTISADTSKNTAYLQMNSLRAEDTAVYYCAR [symbol] DYWGQGT
LVTVSSGGGGSDIQMTQSPSSLSASVGDRVTITCRAS [symbol] VAWYQQKPGKAPKL
LIY [symbol] SGVPSRFSGSRSGTDFTLTISSLQPEDFATYYCQQ [symbol] TFGQGTKV
EIKGGGGSGGGGSEPKSSDKTHTCPPCPAPEAAGGPSVFLFPPKPKDTLMISRTPEVTC
VVVDVSHEDPEVKFNWYVDGVEVHNAKTKPREEQYNSTYRVVSVLTVLHQDWLN
GKEYKCKVSNKALPASIEKTISKAKGQPREPQVYTLPPCREEMTKNQVSLWCLVKGF
YPSDIAVEWESNGQPENNYKTTPPVLDSDGSFFLYSKLTVDKSRWQQGNVFSCSVM
HEALHNHYTQKSLSLSPGKGGGSGGGSGGGSGGGSGSTGEVQLVESGGGLVQPGGS
LRLSCAASGF [symbol] HWVRQAPGKGLEWVA [symbol] YADSVKGRFTISADTS
KNTAYLQMNSLRAEDTAVYYCAR [symbol] DYWGQGTLVTVSSASTKGPSVFPL
APSSKSTSGGTAALGCLVKDYFPEPVTVSWNSGALTSGVHTFPAVLQSSGLYSLSSV
VTVPSSSLGTQTYICNVNHKPSNTKVDKKVEPKSCDKTHT* (SEQ ID NO: 951)
ANT39 LC
MNLLLILTFVAAAVADIQMTQSPSSLSASVGDRVTITCRAS [symbol] VAWYQQKPGK
APKLLIY [symbol] SGVPSRFSGSRSGTDFTLTISSLQPEDFATYYCQQ [symbol] TFGQG
TKVEIKRTVAAPSVFIFPPSDEQLKSGTASVVCLLNNFYPREAKVQWKVDNALQSGN
SQESVTEQDSKDSTYSLSSTLTLSKADYEKHKVYACEVTHQGLSSPVTKSFNRGEC*
(SEQ ID NO: 909)
Mature ANT39 LC
[sequence omitted] [symbol] VAWYQQKPGKAPKLLIY [symbol] SGV
PSRFSGSRSGTDFTLTISSLQPEDFATYYCQQ [symbol] TFGQGTKVEIKRTVAAPSVFI
FPPSDEQLKSGTASVVCLLNNFYPREAKVQWKVDNALQSGNSQESVTEQDSKDSTY
SLSSTLTLSKADYEKHKVYACEVTHQGLSSPVTKSFNRGEC (SEQ ID NO: 952)
ANT42i HC hole DANG
MNLLLILTFVAAAVAEVQLVESGGGLVQPGGSLRLSCAASGF [symbol] HWVRQAPG
KGLEWVA [symbol] YADSVKGRFTISADTSKNTAYLQMNSLRAEDTAVYYCAR [symbol]
DYWGQGTLVTVSSASTKGPSVFPLAPSSKSTSGGTAALGCLVKDYFPE
PVTVSWNSGALTSGVHTFPAVLQSSGLYSLSSVVTVPSSSLGTQTYICNVNHKPSNTK
VDKKVEPKSCDKTHTCPPCPAPELLGGPSVFLFPPKPKDTLMISRTPEVTCVVVAVSH
EDPEVKFNWYVDGVEVHNAKTKPREEQYGSTYRVVSVLTVLHQDWLNGKEYKCK
VSNKALPAPIEKTISKAKGQPREPQVYTLPPIRELMTSNQVSLSCAVKGFYPSDIAVEW
ESNGQPENNYKTTPPVLDSDGSFFLVSKLTVDKSRWQQGNVFSCSVMHEALHNHYT
QKSLSLSPGKGGGSGGGSGGGSGGGSGSTGEVQLVESGGGLVQPGGSLRLSCAASGF [symbol]
HWVRQAPGKGLEWVA [symbol] YADSVKGRFTISADTSKNTAYLQMN
SLRAEDTAVYYCAR [symbol] DYWGQGTLVTVSSGGGGSDIQMTQSPSSLSASVGDRV
TITCRAS [symbol] VAWYQQKPGKAPKLLIY [symbol] SGVPSRFSGSRSGTDFTLTISSL
QPEDFATYYCQQ [symbol] TFGQGTKVEIK* (SEQ ID NO: 953)
ANT42i HC hole LALAPS
MNLLLILTFVAAAVAEVQLVESGGGLVQPGGSLRLSCAASGF [symbol] HWVRQAPG
KGLEWVA [symbol] YADSVKGRFTISADTSKNTAYLQMNSLRAEDTAVYYCAR [symbol]
DYWGQGTLVTVSSASTKGPSVFPLAPSSKSTSGGTAALGCLVKDYFPE
PVTVSWNSGALTSGVHTFPAVLQSSGLYSLSSVVTVPSSSLGTQTYICNVNHKPSNTK
VDKKVEPKSCDKTHTCPPCPAPEAAGGPSVFLFPPKPKDTLMISRTPEVTCVVVDVSH
EDPEVKFNWYVDGVEVHNAKTKPREEQYNSTYRVVSVLTVLHQDWLNGKEYKCK
VSNKALPASIEKTISKAKGQPREPQVYTLPPIRELMTSNQVSLSCAVKGFYPSDIAVEW
ESNGQPENNYKTTPPVLDSDGSFFLVSKLTVDKSRWQQGNVFSCSVMHEALHNHYT
QKSLSLSPGKGGGSGGGSGGGSGGGSGSTGEVQLVESGGGLVQPGGSLRLSCAASGF [symbol]
HWVRQAPGKGLEWVA [symbol] YADSVKGRFTISADTSKNTAYLQMN
SLRAEDTAVYYCAR [symbol] DYWGQGTLVTVSSGGGGSDIQMTQSPSSLSASVGDRV
TITCRAS [symbol] VAWYQQKPGKAPKLLIY [symbol] SGVPSRFSGSRSGTDFTLTISSL
QPEDFATYYCQQ [symbol] TFGQGTKVEIK* (SEQ ID NO: 954)
ANT42i HC hole LALAPS Merchant
MNLLLILTFVAAAVAEVQLVESGGGLVQPGGSLRLSCAASGF [symbol] HWVRQAPG
KGLEWVA [symbol] YADSVKGRFTISADTSKNTAYLQMNSLRAEDTAVYYCAR [symbol]
DYWGQGTLVTVSSASTKGPSVFPLAPSSKSTSGGTAALGCLVKDYFPE
PVTVSWNSGALTSGVHTFPAVLQSSGLYSLSSVVTVPSSSLGTQTYICNVNHKPSNTK
VDKKVEPKSCDKTHTCPPCPAPEAAGGPSVFLFPPKPKDTLMISRTPEVTCVVVDVSH
EDPEVKFNWYVDGVEVHNAKTKPREEQYNSTYRVVSVLTVLHQDWLNGKEYKCK
VSNKALPASIEKTISKAKGQPREPQVYTLPPSREEMTKNQVSLSCAVKGFYPSDIAVE
WESNGQPENNYKTTPPVLDSDGSFFLVSKLTVDKSRWQQGNVFSCSVMHEALHNHY
TQKSLSLSPGKGGGSGGGSGGGSGGGSGSTGEVQLVESGGGLVQPGGSLRLSCAASG [symbol]
WVRQAPGKGLEWVA [symbol] YADSVKGRFTISADTSKNTAYLQM
NSLRAEDTAVYYCAR [symbol] DYWGQGTLVTVSSGGGGSDIQMTQSPSSLSASVGDR
VTITCRAS [symbol] VAWYQQKPGKAPKLLIY [symbol] SGVPSRFSGSRSGTDFTLTISS
LQPEDFATYYCQQ [symbol] TFGQGTKVEIK* (SEQ ID NO: 955)
ANT42i HC hole LALAPS Merchant S-S
MNLLLILTFVAAAVAEVQLVESGGGLVQPGGSLRLSCAASGF [symbol] HWVRQAPG
KGLEWVA [symbol] YADSVKGRFTISADTSKNTAYLQMNSLRAEDTAVYYCAR [symbol]
DYWGQGTLVTVSSASTKGPSVFPLAPSSKSTSGGTAALGCLVKDYFPE
PVTVSWNSGALTSGVHTFPAVLQSSGLYSLSSVVTVPSSSLGTQTYICNVNHKPSNTK
VDKKVEPKSCDKTHTCPPCPAPEAAGGPSVFLFPPKPKDTLMISRTPEVTCVVVDVSH
EDPEVKFNWYVDGVEVHNAKTKPREEQYNSTYRVVSVLTVLHQDWLNGKEYKCK
VSNKALPASIEKTISKAKGQPREPQVCTLPPSREEMTKNQVSLSCAVKGFYPSDIAVE
WESNGQPENNYKTTPPVLDSDGSFFLVSKLTVDKSRWQQGNVFSCSVMHEALHNHY
TQKSLSLSPGKGGGSGGGSGGGSGGGSGSTGEVQLVESGGGLVQPGGSLRLSCAASG
F [symbol] HWVRQAPGKGLEWVA [symbol] YADSVKGRFTISADTSKNTAYLQM
NSLRAEDTAVYYCAR [symbol] DYWGQGTLVTVSSGGGGSDIQMTQSPSSLSASVGDR
VTITCRAS [symbol] VAWYQQKPGKAPKLLIY [symbol] SGVPSRFSGSRSGTDFTLTISS
LQPEDFATYYCQQ [symbol] TFGQGTKVEIK* (SEQ ID NO: 956)
Mature ANT42i HC hole DANG
EVQLVESGGGLVQPGGSLRLSCAASGF [symbol] HWVRQAPGKGLEWVA [symbol] [symbol]
YADSVKGRFTISADTSKNTAYLQMNSLRAEDTAVYYCAR [symbol] DYWGQ
GTLVTVSSASTKGPSVFPLAPSSKSTSGGTAALGCLVKDYFPEPVTVSWNSGALTSG
VHTFPAVLQSSGLYSLSSVVTVPSSSLGTQTYICNVNHKPSNTKVDKKVEPKSCDKT
HTCPPCPAPELLGGPSVFLFPPKPKDTLMISRTPEVTCVVVAVSHEDPEVKFNWYVDG
VEVHNAKTKPREEQYGSTYRVVSVLTVLHQDWLNGKEYKCKVSNKALPAPIEKTIS
KAKGQPREPQVYTLPPIRELMTSNQVSLSCAVKGFYPSDIAVEWESNGQPENNYKTTP
PVLDSDGSFFLVSKLTVDKSRWQQGNVFSCSVMHEALHNHYTQKSLSLSPGKGGGS
GGGSGGGSGGGSGSTGEVQLVESGGGLVQPGGSLRLSCAASGF [symbol] HWVRQAP
GKGLEWVA [symbol] YADSVKGRFTISADTSKNTAYLQMNSLRAEDTAVYYCA
R [symbol] DYWGQGTLVTVSSGGGGSDIQMTQSPSSLSASVGDRVTITCRAS [symbol] V
AWYQQKPGKAPKLLIY [symbol] SGVPSRFSGSRSGTDFTLTISSLQPEDFATYYCQQ [symbol] [symbol]
TFGQGTKVEIK* (SEQ ID NO: 957)
Mature ANT42i HC hole LALAPS
EVQLVESGGGLVQPGGSLRLSCAASGF [symbol] HWVRQAPGKGLEWVA [symbol] [symbol]
YADSVKGRFTISADTSKNTAYLQMNSLRAEDTAVYYCAR [symbol] DYWGQ
GTLVTVSSASTKGPSVFPLAPSSKSTSGGTAALGCLVKDYFPEPVTVSWNSGALTSG
VHTFPAVLQSSGLYSLSSVVTVPSSSLGTQTYICNVNHKPSNTKVDKKVEPKSCDKT
HTCPPCPAPEAAGGPSVFLFPPKPKDTLMISRTPEVTCVVVDVSHEDPEVKFNWYVD
GVEVHNAKTKPREEQYNSTYRVVSVLTVLHQDWLNGKEYKCKVSNKALPASIEKTI
SKAKGQPREPQVYTLPPIRELMTSNQVSLSCAVKGFYPSDIAVEWESNGQPENNYKTT
PPVLDSDGSFFLVSKLTVDKSRWQQGNVFSCSVMHEALHNHYTQKSLSLSPGKGGG
SGGGSGGGSGGGSGSTGEVQLVESGGGLVQPGGSLRLSCAASGF [symbol] HWVRQA
PGKGLEWVA [symbol] YADSVKGRFTISADTSKNTAYLQMNSLRAEDTAVYYCA
R [symbol] DYWGQGTLVTVSSGGGGSDIQMTQSPSSLSASVGDRVTITCRAS [symbol] V
AWYQQKPGKAPKLLIY [symbol] SGVPSRFSGSRSGTDFTLTISSLQPEDFATYYCQQ [symbol] [symbol]
TFGQGTKVEIK* (SEQ ID NO: 958)
Mature ANT42i HC hole LALAPS Merchant
EVQLVESGGGLVQPGGSLRLSCAASGF [symbol] HWVRQAPGKGLEWVA [symbol] [symbol]
YADSVKGRFTISADTSKNTAYLQMNSLRAEDTAVYYCAR [symbol] DYWGQ
GTLVTVSSASTKGPSVFPLAPSSKSTSGGTAALGCLVKDYFPEPVTVSWNSGALTSG
VHTFPAVLQSSGLYSLSSVVTVPSSSLGTQTYICNVNHKPSNTKVDKKVEPKSCDKT
HTCPPCPAPEAAGGPSVFLFPPKPKDTLMISRTPEVTCVVVDVSHEDPEVKFNWYVD
GVEVHNAKTKPREEQYNSTYRVVSVLTVLHQDWLNGKEYKCKVSNKALPASIEKTI
SKAKGQPREPQVYTLPPSREEMTKNQVSLSCAVKGFYPSDIAVEWESNGQPENNYKT
TPPVLDSDGSFFLVSKLTVDKSRWQQGNVFSCSVMHEALHNHYTQKSLSLSPGKGG
GSGGGSGGGSGGGSGSTGEVQLVESGGGLVQPGGSLRLSCAASGF [symbol] HWVRQ
APGKGLEWVA [symbol] YADSVKGRFTISADTSKNTAYLQMNSLRAEDTAVYYC
AR [symbol] DYWGQGTLVTVSSGGGGSDIQMTQSPSSLSASVGDRVTITCRAS [symbol]
VAWYQQKPGKAPKLLIY [symbol] SGVPSRFSGSRSGTDFTLTISSLQPEDFATYYCQQ [symbol]
TFGQGTKVEIK* (SEQ ID NO: 959)
Mature ANT42i HC hole LALAPS Merchant S-S
EVQLVESGGGLVQPGGSLRLSCAASGF [symbol] HWVRQAPGKGLEWVA [symbol] [symbol]
YADSVKGRFTISADTSKNTAYLQMNSLRAEDTAVYYCAR [symbol] DYWGQ
GTLVTVSSASTKGPSVFPLAPSSKSTSGGTAALGCLVKDYFPEPVTVSWNSGALTSG
VHTFPAVLQSSGLYSLSSVVTVPSSSLGTQTYICNVNHKPSNTKVDKKVEPKSCDKT
HTCPPCPAPEAAGGPSVFLFPPKPKDTLMISRTPEVTCVVVDVSHEDPEVKFNWYVD
GVEVHNAKTKPREEQYNSTYRVVSVLTVLHQDWLNGKEYKCKVSNKALPASIEKTI
SKAKGQPREPQVCTLPPSREEMTKNQVSLSCAVKGFYPSDIAVEWESNGQPENNYKT
TPPVLDSDGSFFLVSKLTVDKSRWQQGNVFSCSVMHEALHNHYTQKSLSLSPGKGG
GSGGGSGGGSGGGSGSTGEVQLVESGGGLVQPGGSLRLSCAASGF [symbol] HWVRQ
APGKGLEWVA [symbol] YADSVKGRFTISADTSKNTAYLQMNSLRAEDTAVYYC
AR [symbol] DYWGQGTLVTVSSGGGGSDIQMTQSPSSLSASVGDRVTITCRAS [symbol]
VAWYQQKPGKAPKLLIY [symbol] SGVPSRFSGSRSGTDFTLTISSLQPEDFATYYCQQ [symbol]
TFGQGTKVEIK* (SEQ ID NO: 960)
ANT42i HC knob DANG
MNLLLILTFVAAAVAEVQLVESGGGLVQPGGSLRLSCAASGF [symbol] HWVRQAPG
KGLEWVA [symbol] YADSVKGRFTISADTSKNTAYLQMNSLRAEDTAVYYCAR [symbol]
DYWGQGTLVTVSSASTKGPSVFPLAPSSKSTSGGTAALGCLVKDYFPE
PVTVSWNSGALTSGVHTFPAVLQSSGLYSLSSVVTVPSSSLGTQTYICNVNHKPSNTK
VDKKVEPKSCDKTHTCPPCPAPELLGGPSVFLFPPKPKDTLMISRTPEVTCVVVAVSH
EDPEVKFNWYVDGVEVHNAKTKPREEQYGSTYRVVSVLTVLHQDWLNGKEYKCK
VSNKALPAPIEKTISKAKGQPREPMVFDLPPSREEMTKNQVSLWCMVKGFYPSDIAV
EWESNGQPENNYKTTPPVLDSDGSFFLYSKLTVDKSRWQQGNVFSCSVMHEALHNH
YTQKSLSLSPGKGGGSGGGSGGGSGGGSGSTGEVQLVESGGGLVQPGGSLRLSCAAS
GF [symbol] HWVRQAPGKGLEWVA [symbol] YADSVKGRFTISADTSKNTAYL
QMNSLRAEDTAVYYCAR [symbol] DYWGQGTLVTVSSGGGGSDIQMTQSPSSLSAS
VGDRVTITCRAS [symbol] VAWYQQKPGKAPKLLIY [symbol] SGVPSRFSGSRSGTDFT
LTISSLQPEDFATYYCQQ [symbol] TFGQGTKVEIK* (SEQ ID NO: 961)
ANT42i HC Knob LALAPS
MNLLLILTFVAAAVAEVQLVESGGGLVQPGGSLRLSCAASGF [symbol] HWVRQAPG
KGLEWVA [symbol] YADSVKGRFTISADTSKNTAYLQMNSLRAEDTAVYYCAR [symbol]
DYWGQGTLVTVSSASTKGPSVFPLAPSSKSTSGGTAALGCLVKDYFPE
PVTVSWNSGALTSGVHTFPAVLQSSGLYSLSSVVTVPSSSLGTQTYICNVNHKPSNTK
VDKKVEPKSCDKTHTCPPCPAPEAAGGPSVFLFPPKPKDTLMISRTPEVTCVVVDVSH
EDPEVKFNWYVDGVEVHNAKTKPREEQYNSTYRVVSVLTVLHQDWLNGKEYKCK
VSNKALPASIEKTISKAKGQPREPMVFDLPPSREEMTKNQVSLWCMVKGFYPSDIAVE
WESNGQPENNYKTTPPVLDSDGSFFLYSKLTVDKSRWQQGNVFSCSVMHEALHNH
YTQKSLSLSPGKGGGSGGGSGGGSGGGSGSTGEVQLVESGGGLVQPGGSLRLSCAAS
GF [symbol] HWVRQAPGKGLEWVA [symbol] YADSVKGRFTISADTSKNTAYL
QMNSLRAEDTAVYYCAR [symbol] DYWGQGTLVTVSSGGGGSDIQMTQSPSSLSAS
VGDRVTITCRAS [symbol] VAWYQQKPGKAPKLLIY [symbol] SGVPSRFSGSRSGTDFT
LTISSLQPEDFATYYCQQ [symbol] TFGQGTKVEIK* (SEQ ID NO: 962)
ANT42i HC Knob LALAPS Merchant
MNLLLILTFVAAAVAEVQLVESGGGLVQPGGSLRLSCAASGF [symbol] HWVRQAPG
KGLEWVA [symbol] YADSVKGRFTISADTSKNTAYLQMNSLRAEDTAVYYCAR [symbol]
DYWGQGTLVTVSSASTKGPSVFPLAPSSKSTSGGTAALGCLVKDYFPE
PVTVSWNSGALTSGVHTFPAVLQSSGLYSLSSVVTVPSSSLGTQTYICNVNHKPSNTK
VDKKVEPKSCDKTHTCPPCPAPEAAGGPSVFLFPPKPKDTLMISRTPEVTCVVVDVSH
EDPEVKFNWYVDGVEVHNAKTKPREEQYNSTYRVVSVLTVLHQDWLNGKEYKCK
VSNKALPASIEKTISKAKGQPREPQVYTLPPSREEMTKNQVSLWCLVKGFYPSDIAVE
WESNGQPENNYKTTPPVLDSDGSFFLYSKLTVDKSRWQQGNVFSCSVMHEALHNH
YTQKSLSLSPGKGGGSGGGSGGGSGGGSGSTGEVQLVESGGGLVQPGGSLRLSCAAS
GF [symbol] HWVRQAPGKGLEWVA [symbol] YADSVKGRFTISADTSKNTAYL
QMNSLRAEDTAVYYCAR [symbol] DYWGQGTLVTVSSGGGGSDIQMTQSPSSLSAS
VGDRVTITCRAS [symbol] VAWYQQKPGKAPKLLIY [symbol] SGVPSRFSGSRSGTDFT
LTISSLQPEDFATYYCQQ [symbol] TFGQGTKVEIK* (SEQ ID NO: 963)
ANT42i HC Knob LALAPS Merchant S-S
MNLLLILTFVAAAVAEVQLVESGGGLVQPGGSLRLSCAASGF [symbol] HWVRQAPG
KGLEWVA [symbol] YADSVKGRFTISADTSKNTAYLQMNSLRAEDTAVYYCAR [symbol]
DYWGQGTLVTVSSASTKGPSVFPLAPSSKSTSGGTAALGCLVKDYFPE
PVTVSWNSGALTSGVHTFPAVLQSSGLYSLSSVVTVPSSSLGTQTYICNVNHKPSNTK
VDKKVEPKSCDKTHTCPPCPAPEAAGGPSVFLFPPKPKDTLMISRTPEVTCVVVDVSH
EDPEVKFNWYVDGVEVHNAKTKPREEQYNSTYRVVSVLTVLHQDWLNGKEYKCK
VSNKALPASIEKTISKAKGQPREPQVYTLPPCREEMTKNQVSLWCLVKGFYPSDIAVE
WESNGQPENNYKTTPPVLDSDGSFFLYSKLTVDKSRWQQGNVFSCSVMHEALHNH
YTQKSLSLSPGKGGGSGGGSGGGSGGGSGSTGEVQLVESGGGLVQPGGSLRLSCAAS
GF [symbol] HWVRQAPGKGLEWVA [symbol] YADSVKGRFTISADTSKNTAYL
QMNSLRAEDTAVYYCAR [symbol] DYWGQGTLVTVSSGGGGSDIQMTQSPSSLSAS
VGDRVTITCRAS [symbol] VAWYQQKPGKAPKLLIY [symbol] SGVPSRFSGSRSGTDFT
LTISSLQPEDFATYYCQQ [symbol] TFGQGTKVEIK* (SEQ ID NO: 964)
Mature ANT42i HC knob DANG
EVQLVESGGGLVQPGGSLRLSCAASGF [symbol] WVRQAPGKGLEWVA [symbol] [symbol]
YADSVKGRFTISADTSKNTAYLQMNSLRAEDTAVYYCAR [symbol] DYWGQ
GTLVTVSSASTKGPSVFPLAPSSKSTSGGTAALGCLVKDYFPEPVTVSWNSGALTSG
VHTFPAVLQSSGLYSLSSVVTVPSSSLGTQTYICNVNHKPSNTKVDKKVEPKSCDKT
HTCPPCPAPELLGGPSVFLFPPKPKDTLMISRTPEVTCVVVAVSHEDPEVKFNWYVDG
VEVHNAKTKPREEQYGSTYRVVSVLTVLHQDWLNGKEYKCKVSNKALPAPIEKTIS
KAKGQPREPMVFDLPPSREEMTKNQVSLWCMVKGFYPSDIAVEWESNGQPENNYKT
TPPVLDSDGSFFLYSKLTVDKSRWQQGNVFSCSVMHEALHNHYTQKSLSLSPGKGG
GSGGGSGGGSGGGSGSTGEVQLVESGGGLVQPGGSLRLSCAASGF [symbol] HWV
RQAPGKGLEWVA [symbol] YADSVKGRFTISADTSKNTAYLQMNSLRAEDTAV
YYCAR [symbol] DYWGQGTLVTVSSGGGGSDIQMTQSPSSLSASVGDRVTITCRAS [symbol] [symbol]
VAWYQQKPGKAPKLLIY [symbol] SGVPSRFSGSRSGTDFTLTISSLQPEDFATY
YCQQ [symbol] TFGQGTKVEIK* (SEQ ID NO: 965)
Mature ANT42i HC Knob LALAPS
EVQLVESGGGLVQPGGSLRLSCAASGF [symbol] HWVRQAPGKGLEWVA [symbol] [symbol]
YADSVKGRFTISADTSKNTAYLQMNSLRAEDTAVYYCAR [symbol] DYWGQ
GTLVTVSSASTKGPSVFPLAPSSKSTSGGTAALGCLVKDYFPEPVTVSWNSGALTSG
VHTFPAVLQSSGLYSLSSVVTVPSSSLGTQTYICNVNHKPSNTKVDKKVEPKSCDKT
HTCPPCPAPEAAGGPSVFLFPPKPKDTLMISRTPEVTCVVVDVSHEDPEVKFNWYVD
GVEVHNAKTKPREEQYNSTYRVVSVLTVLHQDWLNGKEYKCKVSNKALPASIEKTI
SKAKGQPREPMVFDLPPSREEMTKNQVSLWCMVKGFYPSDIAVEWESNGQPENNYK
TTPPVLDSDGSFFLYSKLTVDKSRWQQGNVFSCSVMHEALHNHYTQKSLSLSPGKG
GGSGGGSGGGSGGGSGSTGEVQLVESGGGLVQPGGSLRLSCAASGF [symbol] HW
VRQAPGKGLEWVA [symbol] YADSVKGRFTISADTSKNTAYLQMNSLRAEDTA
VYYCAR [symbol] DYWGQGTLVTVSSGGGGSDIQMTQSPSSLSASVGDRVTITCRAS [symbol]
VAWYQQKPGKAPKLLIY [symbol] SGVPSRFSGSRSGTDFTLTISSLQPEDFAT
YYCQQ [symbol] TFGQGTKVEIK* (SEQ ID NO: 966)
Mature ANT42i HC Knob LALAPS Merchant
EVQLVESGGGLVQPGGSLRLSCAASGF [symbol] HWVRQAPGKGLEWVA [symbol] [symbol]
YADSVKGRFTISADTSKNTAYLQMNSLRAEDTAVYYCAR [symbol] DYWGQ
GTLVTVSSASTKGPSVFPLAPSSKSTSGGTAALGCLVKDYFPEPVTVSWNSGALTSG
VHTFPAVLQSSGLYSLSSVVTVPSSSLGTQTYICNVNHKPSNTKVDKKVEPKSCDKT
HTCPPCPAPEAAGGPSVFLFPPKPKDTLMISRTPEVTCVVVDVSHEDPEVKFNWYVD
GVEVHNAKTKPREEQYNSTYRVVSVLTVLHQDWLNGKEYKCKVSNKALPASIEKTI
SKAKGQPREPQVYTLPPSREEMTKNQVSLWCLVKGFYPSDIAVEWESNGQPENNYK
TTPPVLDSDGSFFLYSKLTVDKSRWQQGNVFSCSVMHEALHNHYTQKSLSLSPGKG
GGSGGGSGGGSGGGSGSTGEVQLVESGGGLVQPGGSLRLSCAASGF [symbol] HW
VRQAPGKGLEWVA [symbol] YADSVKGRFTISADTSKNTAYLQMNSLRAEDTA
VYYCAR [symbol] DYWGQGTLVTVSSGGGGSDIQMTQSPSSLSASVGDRVTITCRAS [symbol]
VAWYQQKPGKAPKLLIY [symbol] SGVPSRFSGSRSGTDFTLTISSLQPEDFAT
YYCQQ [symbol] TFGQGTKVEIK* (SEQ ID NO: 967)
Mature ANT42i HC Knob LALAPS Merchant S-S
EVQLVESGGGLVQPGGSLRLSCAASGF [symbol] HWVRQAPGKGLEWVA [symbol] [symbol]
YADSVKGRFTISADTSKNTAYLQMNSLRAEDTAVYYCAR [symbol] DYWGQ
GTLVTVSSASTKGPSVFPLAPSSKSTSGGTAALGCLVKDYFPEPVTVSWNSGALTSG
VHTFPAVLQSSGLYSLSSVVTVPSSSLGTQTYICNVNHKPSNTKVDKKVEPKSCDKT
HTCPPCPAPEAAGGPSVFLFPPKPKDTLMISRTPEVTCVVVDVSHEDPEVKFNWYVD
GVEVHNAKTKPREEQYNSTYRVVSVLTVLHQDWLNGKEYKCKVSNKALPASIEKTI
SKAKGQPREPQVYTLPPCREEMTKNQVSLWCLVKGFYPSDIAVEWESNGQPENNYK
TTPPVLDSDGSFFLYSKLTVDKSRWQQGNVFSCSVMHEALHNHYTQKSLSLSPGKG
GGSGGGSGGGSGGGSGSTGEVQLVESGGGLVQPGGSLRLSCAASGF [symbol] HW
VRQAPGKGLEWVA [symbol] YADSVKGRFTISADTSKNTAYLQMNSLRAEDTA
VYYCAR [symbol] DYWGQGTLVTVSSGGGGSDIQMTQSPSSLSASVGDRVTITCRAS [symbol]
VAWYQQKPGKAPKLLIY [symbol] SGVPSRFSGSRSGTDFTLTISSLQPEDFAT
YYCQQ [symbol] TFGQGTKVEIK* (SEQ ID NO: 968)
ANT42 Hc Hole DANG
MNLLLILTFVAAAVAEVQLVESGGGLVQPGGSLRLSCAASGF [symbol] HWVRQAPG
KGLEWVA [symbol] YADSVKGRFTISADTSKNTAYLQMNSLRAEDTAVYYCAR [symbol] [symbol]
DYWGQGTLVTVSSGGGGSDIQMTQSPSSLSASVGDRVTITCRAS [symbol] VAW
YQQKPGKAPKLLIY [symbol] SGVPSRFSGSRSGTDFTLTISSLQPEDFATYYCQQ [symbol] [symbol]
TFGQGTKVEIKGGGGSGGGGSEPKSSDKTHTCPPCPAPELLGGPSVFLFPPKPKD
TLMISRTPEVTCVVVAVSHEDPEVKFNWYVDGVEVHNAKTKPREEQYGSTYRVVSV
LTVLHQDWLNGKEYKCKVSNKALPAPIEKTISKAKGQPREPQVYTLPPIRELMTSNQ
VSLSCAVKGFYPSDIAVEWESNGQPENNYKTTPPVLDSDGSFFLVSKLTVDKSRWQQ
GNVFSCSVMHEALHNHYTQKSLSLSPGKGGGSGGGSGGGSGGGSGSTGEVQLVESG
GGLVQPGGSLRLSCAASGF [symbol] HWVRQAPGKGLEWVA [symbol] YADSVK
GRFTISADTSKNTAYLQMNSLRAEDTAVYYCAR [symbol] FDYWGQGTLVTVSSA
STKGPSVFPLAPSSKSTSGGTAALGCLVKDYFPEPVTVSWNSGALTSGVHTFPAVLQS
SGLYSLSSVVTVPSSSLGTQTYICNVNHKPSNTKVDKKVEPKSCDKTHT* (SEQ ID
NO: 911)
ANT42 Hc Hole LALAPS
MNLLLILTFVAAAVAEVQLVESGGGLVQPGGSLRLSCAASGF [symbol] HWVRQAPG
KGLEWVA [symbol] YADSVKGRFTISADTSKNTAYLQMNSLRAEDTAVYYCAR [symbol] [symbol]
DYWGQGTLVTVSSGGGGSDIQMTQSPSSLSASVGDRVTITCRAS [symbol] VAW
YQQKPGKAPKLLIY [symbol] SGVPSRFSGSRSGTDFTLTISSLQPEDFATYYCQQ [symbol] [symbol]
TFGQGTKVEIKGGGGSGGGGSEPKSSDKTHTCPPCPAPEAAGGPSVFLFPPKPKD
TLMISRTPEVTCVVVDVSHEDPEVKFNWYVDGVEVHNAKTKPREEQYNSTYRVVSV
LTVLHQDWLNGKEYKCKVSNKALPASIEKTISKAKGQPREPQVYTLPPIRELMTSNQ
VSLSCAVKGFYPSDIAVEWESNGQPENNYKTTPPVLDSDGSFFLVSKLTVDKSRWQQ
GNVFSCSVMHEALHNHYTQKSLSLSPGKGGGSGGGSGGGSGGGSGSTGEVQLVESG
GGLVQPGGSLRLSCAASGF [symbol] HWVRQAPGKGLEWVA [symbol] YADSVK
GRFTISADTSKNTAYLQMNSLRAEDTAVYYCAR [symbol] DYWGQGTLVTVSSA
STKGPSVFPLAPSSKSTSGGTAALGCLVKDYFPEPVTVSWNSGALTSGVHTFPAVLQS
SGLYSLSSVVTVPSSSLGTQTYICNVNHKPSNTKVDKKVEPKSCDKTHT* (SEQ ID
NO: 969)
ANT42 Hc Hole LALAPS Merchant
MNLLLILTFVAAAVAEVQLVESGGGLVQPGGSLRLSCAASGF [symbol] HWVRQAPG
KGLEWVA [symbol] YADSVKGRFTISADTSKNTAYLQMNSLRAEDTAVYYCAR [symbol] [symbol]
DYWGQGTLVTVSSGGGGSDIQMTQSPSSLSASVGDRVTITCRAS [symbol] VAW
YQQKPGKAPKLLIY [symbol] SGVPSRFSGSRSGTDFTLTISSLQPEDFATYYCQQ [symbol] [symbol]
TFGQGTKVEIKGGGGSGGGGSEPKSSDKTHTCPPCPAPEAAGGPSVFLFPPKPKD
TLMISRTPEVTCVVVDVSHEDPEVKFNWYVDGVEVHNAKTKPREEQYNSTYRVVSV
LTVLHQDWLNGKEYKCKVSNKALPASIEKTISKAKGQPREPQVYTLPPSREEMTKNQ
VSLSCAVKGFYPSDIAVEWESNGQPENNYKTTPPVLDSDGSFFLVSKLTVDKSRWQQ
GNVFSCSVMHEALHNHYTQKSLSLSPGKGGGSGGGSGGGSGGGSGSTGEVQLVESG
GGLVQPGGSLRLSCAASGF [symbol] HWVRQAPGKGLEWVA [symbol] YADSVK
GRFTISADTSKNTAYLQMNSLRAEDTAVYYCAR [symbol] DYWGQGTLVTVSSA
STKGPSVFPLAPSSKSTSGGTAALGCLVKDYFPEPVTVSWNSGALTSGVHTFPAVLQS
SGLYSLSSVVTVPSSSLGTQTYICNVNHKPSNTKVDKKVEPKSCDKTHT* (SEQ ID
NO: 970)
ANT42 Hc Hole LALAPS Merchant S-S
MNLLLILTFVAAAVAEVQLVESGGGLVQPGGSLRLSCAASGF [symbol] HWVRQAPG
KGLEWVA [symbol] YADSVKGRFTISADTSKNTAYLQMNSLRAEDTAVYYCAR [symbol] [symbol]
DYWGQGTLVTVSSGGGGSDIQMTQSPSSLSASVGDRVTITCRAS [symbol] VAW
YQQKPGKAPKLLIY [symbol] SGVPSRFSGSRSGTDFTLTISSLQPEDFATYYCQQ [symbol] [symbol]
TFGQGTKVEIKGGGGSGGGGSEPKSSDKTHTCPPCPAPEAAGGPSVFLFPPKPKD
TLMISRTPEVTCVVVDVSHEDPEVKFNWYVDGVEVHNAKTKPREEQYNSTYRVVSV
LTVLHQDWLNGKEYKCKVSNKALPASIEKTISKAKGQPREPQVCTLPPSREEMTKNQ
VSLSCAVKGFYPSDIAVEWESNGQPENNYKTTPPVLDSDGSFFLVSKLTVDKSRWQQ
GNVFSCSVMHEALHNHYTQKSLSLSPGKGGGSGGGSGGGSGGGSGSTGEVQLVESG
GGLVQPGGSLRLSCAASGF [symbol] HWVRQAPGKGLEWVA [symbol] YADSVK
GRFTISADTSKNTAYLQMNSLRAEDTAVYYCAR [symbol] DYWGQGTLVTVSSA
STKGPSVFPLAPSSKSTSGGTAALGCLVKDYFPEPVTVSWNSGALTSGVHTFPAVLQS
SGLYSLSSVVTVPSSSLGTQTYICNVNHKPSNTKVDKKVEPKSCDKTHT* (SEQ ID
NO: 971)
cMature ANT42 Hc Hole DANG
EVQLVESGGGLVQPGGSLRLSCAASGF [symbol] HWVRQAPGKGLEWVA [symbol] [symbol]
YADSVKGRFTISADTSKNTAYLQMNSLRAEDTAVYYCAR [symbol] DYWGQGTLVT
VSSGGGGSDIQMTQSPSSLSASVGDRVTITCRAS [symbol] VAWYQQKPGKAPKLLIY [symbol] [symbol]
SGVPSRFSGSRSGTDFTLTISSLQPEDFATYYCQQ [symbol] TFGQGTKVEIKG
GGGSGGGGSEPKSSDKTHTCPPCPAPELLGGPSVFLFPPKPKDTLMISRTPEVTCVVV
AVSHEDPEVKFNWYVDGVEVHNAKTKPREEQYGSTYRVVSVLTVLHQDWLNGKEY
KCKVSNKALPAPIEKTISKAKGQPREPQVYTLPPIRELMTSNQVSLSCAVKGFYPSDIA
VEWESNGQPENNYKTTPPVLDSDGSFFLVSKLTVDKSRWQQGNVFSCSVMHEALHN
HYTQKSLSLSPGKGGGSGGGSGGGSGGGSGSTGEVQLVESGGGLVQPGGSLRLSCA
ASGF [symbol] HWVRQAPGKGLEWVA [symbol] YADSVKGRFTISADTSKNTAY
LQMNSLRAEDTAVYYCARAFFGSyHFFDYWGQGTLVTVSSASTKGPSVFPLAPSSK
STSGGTAALGCLVKDYFPEPVTVSWNSGALTSGVHTFPAVLQSSGLYSLSSVVTVPS
SSLGTQTYICNVNHKPSNTKVDKKVEPKSCDKTHT* (SEQ ID NO: 972)
Mature ANT42 Hc Hole LALAPS
EVQLVESGGGLVQPGGSLRLSCAASGF [symbol] HWVRQAPGKGLEWVA [symbol] [symbol]
YADSVKGRFTISADTSKNTAYLQMNSLRAEDTAVYYCAR [symbol] DYWGQGTLVT
VSSGGGGSDIQMTQSPSSLSASVGDRVTITCRAS [symbol] VAWYQQKPGKAPKLLIY [symbol] [symbol]
SGVPSRFSGSRSGTDFTLTISSLQPEDFATYYCQQ [symbol] TFGQGTKVEIKG
GGGSGGGGSEPKSSDKTHTCPPCPAPEAAGGPSVFLFPPKPKDTLMISRTPEVTCVVV
DVSHEDPEVKFNWYVDGVEVHNAKTKPREEQYNSTYRVVSVLTVLHQDWLNGKE
YKCKVSNKALPASIEKTISKAKGQPREPQVYTLPPIRELMTSNQVSLSCAVKGFYPSDI
AVEWESNGQPENNYKTTPPVLDSDGSFFLVSKLTVDKSRWQQGNVFSCSVMHEALH
NHYTQKSLSLSPGKGGGSGGGSGGGSGGGSGSTGEVQLVESGGGLVQPGGSLRLSC
AASGF [symbol] HWVRQAPGKGLEWVA [symbol] YADSVKGRFTISADTSKNTA
YLQMNSLRAEDTAVYYCAR [symbol] DYWGQGTLVTVSSASTKGPSVFPLAPSS
KSTSGGTAALGCLVKDYFPEPVTVSWNSGALTSGVHTFPAVLQSSGLYSLSSVVTVP
SSSLGTQTYICNVNHKPSNTKVDKKVEPKSCDKTHT* (SEQ ID NO: 973)
Mature ANT42 Hc Hole LALAPS Merchant
EVQLVESGGGLVQPGGSLRLSCAASGF [symbol] HWVRQAPGKGLEWVA [symbol] [symbol]
YADSVKGRFTISADTSKNTAYLQMNSLRAEDTAVYYCAR [symbol] DYWGQGTLVT
VSSGGGGSDIQMTQSPSSLSASVGDRVTITCRAS [symbol] VAWYQQKPGKAPKLLIY [symbol] [symbol]
SGVPSRFSGSRSGTDFTLTISSLQPEDFATYYCQQ [symbol] TFGQGTKVEIKG
GGGSGGGGSEPKSSDKTHTCPPCPAPEAAGGPSVFLFPPKPKDTLMISRTPEVTCVVV
DVSHEDPEVKFNWYVDGVEVHNAKTKPREEQYNSTYRVVSVLTVLHQDWLNGKE
YKCKVSNKALPASIEKTISKAKGQPREPQVYTLPPSREEMTKNQVSLSCAVKGFYPSD
IAVEWESNGQPENNYKTTPPVLDSDGSFFLVSKLTVDKSRWQQGNVFSCSVMHEAL
HNHYTQKSLSLSPGKGGGSGGGSGGGSGGGSGSTGEVQLVESGGGLVQPGGSLRLS
CAASGF [symbol] HWVRQAPGKGLEWVA [symbol] YADSVKGRFTISADTSKNT
AYLQMNSLRAEDTAVYYCAR [symbol] DYWGQGTLVTVSSASTKGPSVFPLAPS
SKSTSGGTAALGCLVKDYFPEPVTVSWNSGALTSGVHTFPAVLQSSGLYSLSSVVTV
PSSSLGTQTYICNVNHKPSNTKVDKKVEPKSCDKTHT* (SEQ ID NO: 974)
Mature ANT42 Hc Hole LALAPS Merchant S-S
EVQLVESGGGLVQPGGSLRLSCAASGF [symbol] HWVRQAPGKGLEWVA [symbol] [symbol]
YADSVKGRFTISADTSKNTAYLQMNSLRAEDTAVYYCAR [symbol] DYWGQGTLVT
VSSGGGGSDIQMTQSPSSLSASVGDRVTITCRAS [symbol] VAWYQQKPGKAPKLLIY [symbol] [symbol]
SGVPSRFSGSRSGTDFTLTISSLQPEDFATYYCQQ [symbol] TFGQGTKVEIKG
GGGSGGGGSEPKSSDKTHTCPPCPAPEAAGGPSVFLFPPKPKDTLMISRTPEVTCVVV
DVSHEDPEVKFNWYVDGVEVHNAKTKPREEQYNSTYRVVSVLTVLHQDWLNGKE
YKCKVSNKALPASIEKTISKAKGQPREPQVCTLPPSREEMTKNQVSLSCAVKGFYPSD
IAVEWESNGQPENNYKTTPPVLDSDGSFFLVSKLTVDKSRWQQGNVFSCSVMHEAL
HNHYTQKSLSLSPGKGGGSGGGSGGGSGGGSGSTGEVQLVESGGGLVQPGGSLRLS
CAASGF [symbol] HWVRQAPGKGLEWVA [symbol] YADSVKGRFTISADTSKNT
AYLQMNSLRAEDTAVYYCAR [symbol] DYWGQGTLVTVSSASTKGPSVFPLAPS
SKSTSGGTAALGCLVKDYFPEPVTVSWNSGALTSGVHTFPAVLQSSGLYSLSSVVTV
PSSSLGTQTYICNVNHKPSNTKVDKKVEPKSCDKTHT* (SEQ ID NO: 975)
ANT42 Hc knob DANG
MNLLLILTFVAAAVAEVQLVESGGGLVQPGGSLRLSCAASGF [symbol] HWVRQAP
GKGLEWVA [symbol] YADSVKGRFTISADTSKNTAYLQMNSLRAEDTAVYYCA
R [symbol] DYWGQGTLVTVSSGGGGSDIQMTQSPSSLSASVGDRVTITCRAS [symbol]
VAWYQQKPGKAPKLLIY [symbol] SGVPSRFSGSRSGTDFTLTISSLQPEDFATYYCQQ [symbol]
TFGQGTKVEIKGGGGSGGGGSEPKSSDKTHTCPPCPAPELLGGPSVFLFPP
KPKDTLMISRTPEVTCVVVAVSHEDPEVKFNWYVDGVEVHNAKTKPREEQYGSTYR
VVSVLTVLHQDWLNGKEYKCKVSNKALPAPIEKTISKAKGQPREPMVFDLPPSREEM
TKNQVSLWCMVKGFYPSDIAVEWESNGQPENNYKTTPPVLDSDGSFFLYSKLTVDKS
RWQQGNVFSCSVMHEALHNHYTQKSLSLSPGKGGGSGGGSGGGSGGGSGSTGEVQ
LVESGGGLVQPGGSLRLSCAASGF [symbol] HWVRQAPGKGLEWVA [symbol] Y
ADSVKGRFTISADTSKNTAYLQMNSLRAEDTAVYYCAR [symbol] DYWGQGTL
VTVSSASTKGPSVFPLAPSSKSTSGGTAALGCLVKDYFPEPVTVSWNSGALTSGVHTF
PAVLQSSGLYSLSSVVTVPSSSLGTQTYICNVNHKPSNTKVDKKVEPKSCDKTHT*
(SEQ ID NO: 976)
ANT42 Hc knob LALAPS
MNLLLILTFVAAAVAEVQLVESGGGLVQPGGSLRLSCAASGF [symbol] HWVRQAP
GKGLEWVA [symbol] YADSVKGRFTISADTSKNTAYLQMNSLRAEDTAVYYCA
R [symbol] DYWGQGTLVTVSSGGGGSDIQMTQSPSSLSASVGDRVTITCRAS [symbol]
VAWYQQKPGKAPKLLIY [symbol] SGVPSRFSGSRSGTDFTLTISSLQPEDFATYYCQQ [symbol]
TFGQGTKVEIKGGGGSGGGGSEPKSSDKTHTCPPCPAPEAAGGPSVFLFPP
KPKDTLMISRTPEVTCVVVDVSHEDPEVKFNWYVDGVEVHNAKTKPREEQYNSTYR
VVSVLTVLHQDWLNGKEYKCKVSNKALPASIEKTISKAKGQPREPMVFDLPPSREEM
TKNQVSLWCMVKGFYPSDIAVEWESNGQPENNYKTTPPVLDSDGSFFLYSKLTVDKS
RWQQGNVFSCSVMHEALHNHYTQKSLSLSPGKGGGSGGGSGGGSGGGSGSTGEVQ
LVESGGGLVQPGGSLRLSCAASGF [symbol] HWVRQAPGKGLEWVA [symbol] Y
ADSVKGRFTISADTSKNTAYLQMNSLRAEDTAVYYCAR [symbol] DYWGQGTL
VTVSSASTKGPSVFPLAPSSKSTSGGTAALGCLVKDYFPEPVTVSWNSGALTSGVHTF
PAVLQSSGLYSLSSVVTVPSSSLGTQTYICNVNHKPSNTKVDKKVEPKSCDKTHT*
(SEQ ID NO: 977)
ANT42 Hc knob LALAPS Merchant
MNLLLILTFVAAAVAEVQLVESGGGLVQPGGSLRLSCAASGF [symbol] HWVRQAP
GKGLEWVA [symbol] YADSVKGRFTISADTSKNTAYLQMNSLRAEDTAVYYCA
R [symbol] DYWGQGTLVTVSSGGGGSDIQMTQSPSSLSASVGDRVTITCRAS [symbol]
VAWYQQKPGKAPKLLIY [symbol] SGVPSRFSGSRSGTDFTLTISSLQPEDFATYYCQQ [symbol]
TFGQGTKVEIKGGGGSGGGGSEPKSSDKTHTCPPCPAPEAAGGPSVFLFPP
KPKDTLMISRTPEVTCVVVDVSHEDPEVKFNWYVDGVEVHNAKTKPREEQYNSTYR
VVSVLTVLHQDWLNGKEYKCKVSNKALPASIEKTISKAKGQPREPQVYTLPPSREEM
TKNQVSLWCLVKGFYPSDIAVEWESNGQPENNYKTTPPVLDSDGSFFLYSKLTVDKS
RWQQGNVFSCSVMHEALHNHYTQKSLSLSPGKGGGSGGGSGGGSGGGSGSTGEVQ
LVESGGGLVQPGGSLRLSCAASGF [symbol] HWVRQAPGKGLEWVA [symbol] Y
ADSVKGRFTISADTSKNTAYLQMNSLRAEDTAVYYCAR [symbol] DYWGQGTL
VTVSSASTKGPSVFPLAPSSKSTSGGTAALGCLVKDYFPEPVTVSWNSGALTSGVHTF
PAVLQSSGLYSLSSVVTVPSSSLGTQTYICNVNHKPSNTKVDKKVEPKSCDKTHT*
(SEQ ID NO: 978)
ANT42 Hc knob LALAPS Merchant S-S
MNLLLILTFVAAAVAEVQLVESGGGLVQPGGSLRLSCAASGF [symbol] HWVRQAP
GKGLEWVA [symbol] YADSVKGRFTISADTSKNTAYLQMNSLRAEDTAVYYCA
R [symbol] DYWGQGTLVTVSSGGGGSDIQMTQSPSSLSASVGDRVTITCRAS [symbol]
VAWYQQKPGKAPKLLIY [symbol] SGVPSRFSGSRSGTDFTLTISSLQPEDFATYYCQQ [symbol]
TFGQGTKVEIKGGGGSGGGGSEPKSSDKTHTCPPCPAPEAAGGPSVFLFPP
KPKDTLMISRTPEVTCVVVDVSHEDPEVKFNWYVDGVEVHNAKTKPREEQYNSTYR
VVSVLTVLHQDWLNGKEYKCKVSNKALPASIEKTISKAKGQPREPQVYTLPPCREEM
TKNQVSLWCLVKGFYPSDIAVEWESNGQPENNYKTTPPVLDSDGSFFLYSKLTVDKS
RWQQGNVFSCSVMHEALHNHYTQKSLSLSPGKGGGSGGGSGGGSGGGSGSTGEVQ
LVESGGGLVQPGGSLRLSCAASGF [symbol] HWVRQAPGKGLEWVA [symbol] Y
ADSVKGRFTISADTSKNTAYLQMNSLRAEDTAVYYCAR [symbol] DYWGQGTL
VTVSSASTKGPSVFPLAPSSKSTSGGTAALGCLVKDYFPEPVTVSWNSGALTSGVHTF
PAVLQSSGLYSLSSVVTVPSSSLGTQTYICNVNHKPSNTKVDKKVEPKSCDKTHT*
(SEQ ID NO: 979)
Mature ANT42 Hc knob DANG
EVQLVESGGGLVQPGGSLRLSCAASGF [symbol] HWVRQAPGKGLEWVA [symbol] [symbol]
YADSVKGRFTISADTSKNTAYLQMNSLRAEDTAVYYCAR [symbol] DYWGQGT
LVTVSSGGGGSDIQMTQSPSSLSASVGDRVTITCRAS [symbol] VAWYQQKPGKAPKL
LIY [symbol] SGVPSRFSGSRSGTDFTLTISSLQPEDFATYYCQQ [symbol] TFGQGTKV
EIKGGGGSGGGGSEPKSSDKTHTCPPCPAPELLGGPSVFLFPPKPKDTLMISRTPEVTC
VVVAVSHEDPEVKFNWYVDGVEVHNAKTKPREEQYGSTYRVVSVLTVLHQDWLN
GKEYKCKVSNKALPAPIEKTISKAKGQPREPMVFDLPPSREEMTKNQVSLWCMVKGF
YPSDIAVEWESNGQPENNYKTTPPVLDSDGSFFLYSKLTVDKSRWQQGNVFSCSVM
HEALHNHYTQKSLSLSPGKGGGSGGGSGGGSGGGSGSTGEVQLVESGGGLVQPGGS
LRLSCAASGF [symbol] HWVRQAPGKGLEWVA [symbol] YADSVKGRFTISADTS
KNTAYLQMNSLRAEDTAVYYCAR [symbol] DYWGQGTLVTVSSASTKGPSVFPL
APSSKSTSGGTAALGCLVKDYFPEPVTVSWNSGALTSGVHTFPAVLQSSGLYSLSSV
VTVPSSSLGTQTYICNVNHKPSNTKVDKKVEPKSCDKTHT* (SEQ ID NO: 980)
Mature ANT42 Hc knob LALAPS
EVQLVESGGGLVQPGGSLRLSCAASGF [symbol] HWVRQAPGKGLEWVA [symbol] [symbol]
YADSVKGRFTISADTSKNTAYLQMNSLRAEDTAVYYCAR [symbol] DYWGQGT
LVTVSSGGGGSDIQMTQSPSSLSASVGDRVTITCRAS [symbol] VAWYQQKPGKAPKL
LIY [symbol] SGVPSRFSGSRSGTDFTLTISSLQPEDFATYYCQQ [symbol] TFGQGTKV
EIKGGGGSGGGGSEPKSSDKTHTCPPCPAPEAAGGPSVFLFPPKPKDTLMISRTPEVTC
VVVDVSHEDPEVKFNWYVDGVEVHNAKTKPREEQYNSTYRVVSVLTVLHQDWLN
GKEYKCKVSNKALPASIEKTISKAKGQPREPMVFDLPPSREEMTKNQVSLWCMVKGF
YPSDIAVEWESNGQPENNYKTTPPVLDSDGSFFLYSKLTVDKSRWQQGNVFSCSVM
HEALHNHYTQKSLSLSPGKGGGSGGGSGGGSGGGSGSTGEVQLVESGGGLVQPGGS
LRLSCAASGF [symbol] HWVRQAPGKGLEWVA [symbol] YADSVKGRFTISADTS
KNTAYLQMNSLRAEDTAVYYCAR [symbol] DYWGQGTLVTVSSASTKGPSVFPL
APSSKSTSGGTAALGCLVKDYFPEPVTVSWNSGALTSGVHTFPAVLQSSGLYSLSSV
VTVPSSSLGTQTYICNVNHKPSNTKVDKKVEPKSCDKTHT* (SEQ ID NO: 981)
Mature ANT42 Hc knob LALAPS Merchant
EVQLVESGGGLVQPGGSLRLSCAASGF [symbol] HWVRQAPGKGLEWVA [symbol] [symbol]
YADSVKGRFTISADTSKNTAYLQMNSLRAEDTAVYYCAR [symbol] DYWGQGT
LVTVSSGGGGSDIQMTQSPSSLSASVGDRVTITCRAS [symbol] VAWYQQKPGKAPKL
LIY [symbol] SGVPSRFSGSRSGTDFTLTISSLQPEDFATYYCQQ [symbol] TFGQGTKV
EIKGGGGSGGGGSEPKSSDKTHTCPPCPAPEAAGGPSVFLFPPKPKDTLMISRTPEVTC
VVVDVSHEDPEVKFNWYVDGVEVHNAKTKPREEQYNSTYRVVSVLTVLHQDWLN
GKEYKCKVSNKALPASIEKTISKAKGQPREPQVYTLPPSREEMTKNQVSLWCLVKGF
YPSDIAVEWESNGQPENNYKTTPPVLDSDGSFFLYSKLTVDKSRWQQGNVFSCSVM
HEALHNHYTQKSLSLSPGKGGGSGGGSGGGSGGGSGSTGEVQLVESGGGLVQPGGS
LRLSCAASGF [symbol] HWVRQAPGKGLEWVA [symbol] YADSVKGRFTISADTS
KNTAYLQMNSLRAEDTAVYYCAR [symbol] DYWGQGTLVTVSSASTKGPSVFPL
APSSKSTSGGTAALGCLVKDYFPEPVTVSWNSGALTSGVHTFPAVLQSSGLYSLSSV
VTVPSSSLGTQTYICNVNHKPSNTKVDKKVEPKSCDKTHT* (SEQ ID NO: 982)
Mature ANT42 Hc knob LALAPS Merchant S-S
EVQLVESGGGLVQPGGSLRLSCAASGF [symbol] HWVRQAPGKGLEWVA [symbol] [symbol]
YADSVKGRFTISADTSKNTAYLQMNSLRAEDTAVYYCAR [symbol] DYWGQGT
LVTVSSGGGGSDIQMTQSPSSLSASVGDRVTITCRAS [symbol] VAWYQQKPGKAPKL
LIY [symbol] SGVPSRFSGSRSGTDFTLTISSLQPEDFATYYCQQ [symbol] TFGQGTKV
EIKGGGGSGGGGSEPKSSDKTHTCPPCPAPEAAGGPSVFLFPPKPKDTLMISRTPEVTC
VVVDVSHEDPEVKFNWYVDGVEVHNAKTKPREEQYNSTYRVVSVLTVLHQDWLN
GKEYKCKVSNKALPASIEKTISKAKGQPREPQVYTLPPCREEMTKNQVSLWCLVKGF
YPSDIAVEWESNGQPENNYKTTPPVLDSDGSFFLYSKLTVDKSRWQQGNVFSCSVM
HEALHNHYTQKSLSLSPGKGGGSGGGSGGGSGGGSGSTGEVQLVESGGGLVQPGGS
LRLSCAASGF [symbol] HWVRQAPGKGLEWVA [symbol] YADSVKGRFTISADTS
KNTAYLQMNSLRAEDTAVYYCAR [symbol] DYWGQGTLVTVSSASTKGPSVFPL
APSSKSTSGGTAALGCLVKDYFPEPVTVSWNSGALTSGVHTFPAVLQSSGLYSLSSV
VTVPSSSLGTQTYICNVNHKPSNTKVDKKVEPKSCDKTHT* (SEQ ID NO: 983)
ANT42 LC
MNLLLILTFVAAAVADIQMTQSPSSLSASVGDRVTITCRAS [symbol] VAWYQQKPGK
APKLLIY [symbol] SGVPSRFSGSRSGTDFTLTISSLQPEDFATYYCQQ [symbol] TFGQGT
KVEIKRTVAAPSVFIFPPSDEQLKSGTASVVCLLNNFYPREAKVQWKVDNALQSGNS
QESVTEQDSKDSTYSLSSTLTLSKADYEKHKVYACEVTHQGLSSPVTKSFNRGEC*
(SEQ ID NO: 912)
Mature ANT42 LC
[sequence omitted] [symbol] VAWYQQKPGKAPKLLIY [symbol] SGV
PSRFSGSRSGTDFTLTISSLQPEDFATYYCQQ [symbol] TFGQGTKVEIKRTVAAPSVFIF
PPSDEQLKSGTASVVCLLNNFYPREAKVQWKVDNALQSGNSQESVTEQDSKDSTYS
LSSTLTLSKADYEKHKVYACEVTHQGLSSPVTKSFNRGEC (SEQ ID NO: 984)
ANT80-1 Hole
MNLLLILTFVAAAVAEVQLVESGGGLVQPGGSLRLSCAASGF [symbol] HWVRQAPG
KGLEWVA [symbol] YADSVKGRFTISADTSKNTAYLQMNSLRAEDTAVYYCAR [symbol]
DYWGQGTLVTVSSGGGGSDIQMTQSPSSLSASVGDRVTITCRAS
Q [symbol] VAWYQQKPGKAPKLLIYSASSLYSGVPSRFSGSRSGTDFTLTISSLQPEDFAT
YYCQQ [symbol] FGQGTKVEIKGGGGSGGGGSEPKSSDKTHTCPPCPAPELLGGPSVFL
FPPKPKDTLMISRTPEVTCVVVAVSHEDPEVKFNWYVDGVEVHNAKTKPREEQYGS
TYRVVSVLTVLHQDWLNGKEYKCKVSNKALPAPIEKTISKAKGQPREPQVYTLPPIR
ELMTSNQVSLSCAVKGFYPSDIAVEWESNGQPENNYKTTPPVLDSDGSFFLVSKLTV
DKSRWQQGNVFSCSVMHEALHNHYTQKSLSLSPGKGGGSGGGSGGGSGGGSGSTG
EVQLVESGGGLVQPGGSLRLSCAASGF [symbol] HWVRQAPGKGLEWVA [symbol] [symbol]
YADSVKGRFTISADTSKNTAYLQMNSLRAEDTAVYYCAR [symbol] DYWGQGTLVT
VSSASTKGPSVFPLAPSSKSTSGGTAALGCLVKDYFPEPVTVSWNSGALTSGVHTFPA
VLQSSGLYSLSSVVTVPSSSLGTQTYICNVNHKPSNTKVDKKVEPKSCDKTHT (SEQ
ID NO: 986)
ANT80-2 Knob
MNLLLILTFVAAAVAEVQLVESGGGLVQPGGSLRLSCAASGF [symbol] HWVRQAPG
KGLEWVA [symbol] YADSVKGRFTISADTSKNTAYLQMNSLRAEDTAVYYCAR [symbol]
DYWGQGTLVTVSSGGGGSDIQMTQSPSSLSASVGDRVTITCRASQ [symbol] [symbol]
VAWYQQKPGKAPKLLIY [symbol] GVPSRFSGSRSGTDFTLTISSLQPEDFATYYC
QQ [symbol] TFGQGTKVEIKGGGGSGGGGSEPKTSDKTHTCPPCPAPELLGGPSVFLFP
PKPKDTLMISRTPEVTCVVVAVSHEDPEVKFNWYVDGVEVHNAKTKPREEQYGSTY
RVVSVLTVLHQDWLNGKEYKCKVSNKALPAPIEKTISKAKGQPREPMVFDLPPSREE
MTKNQVSLWCMVKGFYPSDIAVEWESNGQPENNYKTTPPVLDSDGSFFLYSKLTVD
KSRWQQGNVFSCSVMHEALHNHYTQKSLSLSPGKGGGSGGGSGGGSGGGSGSTGE
VQLVESGGGLVQPGGSLRLSCAASGF [symbol] HWVRQAPGKGLEWVA [symbol] [symbol]
YYADSVKGRFTISADTSKNTAYLQMNSLRAEDTAVYYCAR [symbol] DYWGQGTLVTV
SSASTKGPSVFPLAPSSKSTSGGTAALGCLVKDYFPEPVTVSWNSGALTSGVHTFPAV
LQSSGLYSLSSVVTVPSSSLGTQTYICNVNHKPSNTKVDKKVEPKSCDKTHT (SEQ ID
NO: 987)
ANT98-1 Hole
MNLLLILTFVAAAVAEVQLVESGGGLVQPGGSLRLSCAASGF [symbol] HWVRQAPG
KGLEWVA [symbol] YADSVKGRFTISADTSKNTAYLQMNSLRAEDTAVYYCAR [symbol]
DYWGQGTLVTVSSGGGGSDIQMTQSPSSLSASVGDRVTITCRAS
Q [symbol] VAWYQQKPGKAPKLLIY [symbol] SGVPSRFSGSRSGTDFTLTISSLQPEDFAT
YYCQQ [symbol] FGQGTKVEIKGGGGSGGGGSEPKSSDKTHTCPPCPAPELLGGPSVFL
FPPKPKDTLMISRTPEVTCVVVAVSHEDPEVKFNWYVDGVEVHNAKTKPREEQYGS
TYRVVSVLTVLHQDWLNGKEYKCKVSNKALPAPIEKTISKAKGQPREPQVYTLPPIR
ELMTSNQVSLSCAVKGFYPSDIAVEWESNGQPENNYKTTPPVLDSDGSFFLVSKLTV
DKSRWQQGNVFSCSVMHEALHNHYTQKSLSLSPGKGGGSGGGSGGGSGGGSGSTG
EVQLVESGGGLVQPGGSLRLSCAASGF [symbol] HWVRQAPGKGLEWVA [symbol] [symbol]
YADSVKGRFTISADTSKNTAYLQMNSLRAEDTAVYYCAR [symbol] DYWGQGTLVT
VSSASTKGPSVFPLAPSSKSTSGGTAALGCLVKDYFPEPVTVSWNSGALTSGVHTFPA
VLQSSGLYSLSSVVTVPSSSLGTQTYICNVNHKPSNTKVDKKVEPKSCDKTHT (SEQ
ID NO: 988)
ANT98-2 Knob
MNLLLILTFVAAAVAEVQLVESGGGLVQPGGSLRLSCAASGF [symbol] HWVRQAPG
KGLEWVA [symbol] YADSVKGRFTISADTSKNTAYLQMNSLRAEDTAVYYCAR [symbol]
DYWGQGTLVTVSSGGGGSDIQMTQSPSSLSASVGDRVTITCRASQ [symbol] [symbol]
VAWYQQKPGKAPKLLIY [symbol] SGVPSRFSGSRSGTDFTLTISSLQPEDFATYYC
QQ [symbol] TFGQGTKVEIKGGGGSGGGGSEPKTSDKTHTCPPCPAPELLGGPSVFLFP
PKPKDTLMISRTPEVTCVVVAVSHEDPEVKFNWYVDGVEVHNAKTKPREEQYGSTY
RVVSVLTVLHQDWLNGKEYKCKVSNKALPAPIEKTISKAKGQPREPMVFDLPPSREE
MTKNQVSLWCMVKGFYPSDIAVEWESNGQPENNYKTTPPVLDSDGSFFLYSKLTVD
KSRWQQGNVFSCSVMHEALHNHYTQKSLSLSPGKGGGSGGGSGGGSGGGSGSTGE
VQLVESGGGLVQPGGSLRLSCAASGF [symbol] HWVRQAPGKGLEWVA [symbol] [symbol]
YADSVKGRFTISADTSKNTAYLQMNSLRAEDTAVYYCAR [symbol] DYWGQGTLVTV
SSASTKGPSVFPLAPSSKSTSGGTAALGCLVKDYFPEPVTVSWNSGALTSGVHTFPAV
LQSSGLYSLSSVVTVPSSSLGTQTYICNVNHKPSNTKVDKKVEPKSCDKTHT (SEQ ID
NO: 989)
ANT99-1 Hole
MNLLLILTFVAAAVAEVQLVESGGGLVQPGGSLRLSCAASG [symbol] HWVRQAPG
KGLEWVA [symbol] YADSVKGRFTISADTSKNTAYLQMNSLRAEDTAVYYCAR [symbol]
DYWGQGTLVTVSSGGGGSDIQMTQSPSSLSASVGDRVTITCRAS
Q [symbol] VAWYQQKPGKAPKLLIY [symbol] SGVPSRFSGSRSGTDFTLTISSLQPEDFAT
YYCQQ [symbol] TFGQGTKVEIKGGGGSGGGGSEPKSSDKTHTCPPCPAPELLGGPSVFL
FPPKPKDTLMISRTPEVTCVVVAVSHEDPEVKFNWYVDGVEVHNAKTKPREEQYGS
TYRVVSVLTVLHQDWLNGKEYKCKVSNKALPAPIEKTISKAKGQPREPQVYTLPPIR
ELMTSNQVSLSCAVKGFYPSDIAVEWESNGQPENNYKTTPPVLDSDGSFFLVSKLTV
DKSRWQQGNVFSCSVMHEALHNHYTQKSLSLSPGKGGGSGGGSGGGSGGGSGSTG
EVQLVESGGGLVQPGGSLRLSCAASGF [symbol] HWVRQAPGKGLEWVA [symbol] [symbol]
YADSVKGRFTISADTSKNTAYLQMNSLRAEDTAVYYCAR [symbol] DYWGQGTLVT
VSSASTKGPSVFPLAPSSKSTSGGTAALGCLVKDYFPEPVTVSWNSGALTSGVHTFPA
VLQSSGLYSLSSVVTVPSSSLGTQTYICNVNHKPSNTKVDKKVEPKSCDKTHT (SEQ
ID NO: 990)
ANT99-2 Knob
MNLLLILTFVAAAVAEVQLVESGGGLVQPGGSLRLSCAASGF [symbol] HWVRQAPG
KGLEWVA [symbol] YADSVKGRFTISADTSKNTAYLQMNSLRAEDTAVYYCAR [symbol]
DYWGQGTLVTVSSGGGGSDIQMTQSPSSLSASVGDRVTITCRASQ [symbol] [symbol]
VAWYQQKPGKAPKLLIY [symbol] SGVPSRFSGSRSGTDFTLTISSLQPEDFATYYC
QQ [symbol] TFGQGTKVEIKGGGGSGGGGSEPKTSDKTHTCPPCPAPELLGGPSVFLFP
PKPKDTLMISRTPEVTCVVVAVSHEDPEVKFNWYVDGVEVHNAKTKPREEQYGSTY
RVVSVLTVLHQDWLNGKEYKCKVSNKALPAPIEKTISKAKGQPREPMVFDLPPSREE
MTKNQVSLWCMVKGFYPSDIAVEWESNGQPENNYKTTPPVLDSDGSFFLYSKLTVD
KSRWQQGNVFSCSVMHEALHNHYTQKSLSLSPGKGGGSGGGSGGGSGGGSGSTGE
VQLVESGGGLVQPGGSLRLSCAASGF [symbol] HWVRQAPGKGLEWVA [symbol] [symbol]
YADSVKGRFTISADTSKNTAYLQMNSLRAEDTAVYYCARYYDMDYWGQGTLVTV
SSASTKGPSVFPLAPSSKSTSGGTAALGCLVKDYFPEPVTVSWNSGALTSGVHTFPAV
LQSSGLYSLSSVVTVPSSSLGTQTYICNVNHKPSNTKVDKKVEPKSCDKTHT (SEQ ID
NO: 991)
ANT80 ANT98 ANT99 LC
MNLLLILTFVAAAVADIQMTQSPSSLSASVGDRVTITCRASQ [symbol] VAWYQQKPGK
APKLLIY [symbol] GVPSRFSGSRSGTDFTLTISSLQPEDFATYYCQQ [symbol] TFGQGT
KVEIKRTVAAPSVFIFPPSDEQLKSGTASVVCLLNNFYPREAKVQWKVDNALQSGNS
QESVTEQDSKDSTYSLSSTLTLSKADYEKHKVYACEVTHQGLSSPVTKSFNRGEC
(SEQ ID NO: 992)
CM0042 (Dia-Fc-Dia)
MNLLLILTFVAAAVAEFEVQLVESGGGLVQPGGSLRLSCAASGF [symbol] HWVRQA
PGKGLEWVA [symbol] YADSVKGRFTISADTSKNTAYLQMNSLRAEDTAVYYCA
R [symbol] DYWGQGTLVTVSSGGGGSDIQMTQSPSSLSASVGDRVTITCRASQ [symbol] [symbol]
VAWYQQKPGKAPKLLIY [symbol] GVPSRFSGSRSGTDFTLTISSLQPEDFATYYC
QQ [symbol] TFGQGTKVEIKLEDKTHTKVEPKSSDKTHTCPPCPAPELLGGPSVFLFPPK
PKDTLMISRTPEVTCVVVDVSHEDPEVKFNWYVDGVEVHNAKTKPREEQYNSTYRV
VSVLTVLHQDWLNGKEYKCKVSNKALPAPIEKTISKAKGQPREPQVYTLPPSREEMT
KNQVSLTCLVKGFYPSDIAVEWESNGQPENNYKTTPPVLDSDGSFFLYSKLTVDKSR
WQQGNVFSCSVMHEALHNHYTQKSLSLSPGKSGSETPGTSESATPESGGGEVQLVES
GGGLVQPGGSLRLSCAASGF [symbol] HWVRQAPGKGLEWVA [symbol] YADSV
KGRFTISADTSKNTAYLQMNSLRAEDTAVYYCAR [symbol] DYWGQGTLVT
VSSGGGGSDIQMTQSPSSLSASVGDRVTITCRASQ [symbol] VAWYQQKPGKAPKLLIY [symbol] [symbol]
GVPSRFSGSRSGTDFTLTISSLQPEDFATYYCQQ [symbol] TFGQGTKVEIK
(SEQ ID NO: 993)
CM0011 Hole (Dia-Fc-Dia)
MNLLLILTFVAAAVAEFEVQLVESGGGLVQPGGSLRLSCAASGF [symbol] HWVRQA
PGKGLEWVA [symbol] YADSVKGRFTISADTSKNTAYLQMNSLRAEDTAVYYCA
R [symbol] DYWGQGTLVTVSSGGGGSDIQMTQSPSSLSASVGDRVTITCRASQ [symbol] [symbol]
VAWYQQKPGKAPKLLIY [symbol] GVPSRFSGSRSGTDFTLTISSLQPEDFATYYC
QQ [symbol] TFGQGTKVEIKLEDKTHTKVEPKSSDKTHNCPPCPAPELLGGPSVFLFPPK
PKDTLMISRTPEVTCVVVDVSHEDPEVKFNWYVDGVEVHNAKTKPREEQYNSTYRV
VSVLTVLHQDWLNGKEYKCKVSNKALPAPIEKTISKAKGQPREPQVYTLPPIRELMT
SNQVSLSCAVKGFYPSDIAVEWESNGQPENNYKTTPPVLDSDGSFFLVSKLTVDKSR
WQQGNVFSCSVMHEALHNHYTQKSLSLSPGKSGSETPGTSESATPESGGGEVQLVES
GGGLVQPGGSLRLSCAASGF [symbol] HWVRQAPGKGLEWVA [symbol] YADSV
KGRFTISADTSKNTAYLQMNSLRAEDTAVYYCAR [symbol] DYWGQG
TLVTVSSGGGGSDIQMTQSPSSLSASVGDRVTITCRASQ [symbol] VAWYQQKPGKAPK
LLIY [symbol] GVPSRFSGSRSGTDFTLTISSLQPEDFATYYCQQ [symbol] TFGQGTKV
EIK (SEQ ID NO: 994)
CM0011 Knob (Dia-Fc-Dia)
MNLLLILTFVAAAVAEFEVQLVESGGGLVQPGGSLRLSCAASGF [symbol] HWVRQA
PGKGLEWVA [symbol] YADSVKGRFTISADTSKNTAYLQMNSLRAEDTAVYYCA
R [symbol] DYWGQGTLVTVSSGGGGSDIQMTQSPSSLSASVGDRVTITCRASQ [symbol] [symbol]
VAWYQQKPGKAPKLLIY [symbol] GVPSRFSGSRSGTDFTLTISSLQPEDFATYYC
QQ [symbol] TFGQGTKVEIKLEDKTHTKVEPKTSDKTHTCPPCPAPELLGGPSVFLFPPK
PKDTLMISRTPEVTCVVVDVSHEDPEVKFNWYVDGVEVHNAKTKPREEQYNSTYRV
VSVLTVLHQDWLNGKEYKCKVSNKALPAPIEKTISKAKGQPREPMVFDLPPSREEMT
KNQVSLWCMVKGFYPSDIAVEWESNGQPENNYKTTPPVLDSDGSFFLYSKLTVDKS
RWQQGNVFSCSVMHEALHNHYTQKSLSLSPGKSGSETPGTSESATPESGGGEVQLVE
SGGGLVQPGGSLRLSCAASGF [symbol] HWVRQAPGKGLEWVA [symbol] YADS
VKGRFTISADTSKNTAYLQMNSLRAEDTAVYYCAR [symbol] MDYWGQGTLV
TVSSGGGGSDIQMTQSPSSLSASVGDRVTITCRASQ [symbol] VAWYQQKPGKAPKLLIY [symbol]
GVPSRFSGSRSGTDFTLTISSLQPEDFATYYCQQ [symbol] TFGQGTKVEIK
(SEQ ID NO: 995)
CMQ126 Hole (Dia-Fc-Dia)
MNLLLILTFVAAAVAEFEVQLVESGGGLVQPGGSLRLSCAASGF [symbol] HWVRQA
PGKGLEWVA [symbol] YADSVKGRFTISADTSKNTAYLQMNSLRAEDTAVYYC
AR [symbol] DYWGQGTLVTVSSGGGGSDIQMTQSPSSLSASVGDRVTITCRASQ [symbol] [symbol]
VAWYQQKPGKAPKLLIY [symbol] GVPSRFSGSRSGTDFTLTISSLQPEDFATYY
CQQ [symbol] TFGQGTKVEIKLEDKTHTKVEPKSSDKTHNCPPCPAPELLGGPSVFLFPP
KPKDTLMISRTPEVTCVVVDVSHEDPEVKFNWYVDGVEVHNAKTKPREEQYNSTYR
VVSVLTVLHQDWLNGKEYKCKVSNKALPAPIEKTISKAKGQPREPQVYTLPPIRELM
TSNQVSLSCAVKGFYPSDIAVEWESNGQPENNYKTTPPVLDSDGSFFLVSKLTVDKS
RWQQGNVFSCSVMHEALHNHYTQKSLSLSPGKSGSETPGTSESATPESGGGEVQLVE
SGGGLVQPGGSLRLSCAASGF [symbol] HWVRQAPGKGLEWVA [symbol] YADSV
KGRFTISADTSKNTAYLQMNSLRAEDTAVYYCAR [symbol] DYWGQG
TLVTVSSGGGGSDIQMTQSPSSLSASVGDRVTITCRASQ [symbol] VAWYQQKPGKAPK
LLIY [symbol] GVPSRFSGSRSGTDFTLTISSLQPEDFATYYCQQ [symbol] FTFGQGTKV
EIK (SEQ ID NO: 996)
CMQ126 Knob (Dia-Fc-Dia)
MNLLLILTFVAAAVAEFEVQLVESGGGLVQPGGSLRLSCAASGF [symbol] HWVRQA
PGKGLEWVA [symbol] YADSVKGRFTISADTSKNTAYLQMNSLRAEDTAVYYC
AR [symbol] DYWGQGTLVTVSSGGGGSDIQMTQSPSSLSASVGDRVTITCRASQ [symbol] [symbol]
VAWYQQKPGKAPKLLIY [symbol] GVPSRFSGSRSGTDFTLTISSLQPEDFATYY
CQQ [symbol] TFGQGTKVEIKLEDKTHTKVEPKTSDKTHTCPPCPAPELLGGPSVFLFPP
KPKDTLMISRTPEVTCVVVDVSHEDPEVKFNWYVDGVEVHNAKTKPREEQYNSTYR
VVSVLTVLHQDWLNGKEYKCKVSNKALPAPIEKTISKAKGQPREPMVFDLPPSREEM
TKNQVSLWCMVKGFYPSDIAVEWESNGQPENNYKTTPPVLDSDGSFFLYSKLTVDK
SRWQQGNVFSCSVMHEALHNHYTQKSLSLSPGKSGSETPGTSESATPESGGGEVQLV
ESGGGLVQPGGSLRLSCAASGF [symbol] HWVRQAPGKGLEWVA [symbol] YADS
VKGRFTISADTSKNTAYLQMNSLRAEDTAVYYCAR [symbol] DYWGQGTLV
TVSSGGGGSDIQMTQSPSSLSASVGDRVTITCRASQ [symbol] VAWYQQKPGKAPKLLIY [symbol]
GVPSRFSGSRSGTDFTLTISSLQPEDFATYYCQQ [symbol] TFGQGTKVEIK
(SEQ ID NO: 997)
CM0107 Hole (Dia-Fc-scFv)
MNLLLILTFVAAAVAEFEVQLVESGGGLVQPGGSLRLSCAASGF [symbol] HWVRQA
PGKGLEWVA [symbol] YADSVKGRFTISADTSKNTAYLQMNSLRAEDTAVYYCA
R [symbol] DYWGQGTLVTVSSGGGGSDIQMTQSPSSLSASVGDRVTITCRASQ [symbol] [symbol]
VAWYQQKPGKAPKLLIY [symbol] GVPSRFSGSRSGTDFTLTISSLQPEDFATYYC
QQ [symbol] TFGQGTKVEIKLEDKTHTKVEPKSSDKTHNCPPCPAPELLGGPSVFLFPPK
PKDTLMISRTPEVTCVVVDVSHEDPEVKFNWYVDGVEVHNAKTKPREEQYNSTYRV
VSVLTVLHQDWLNGKEYKCKVSNKALPAPIEKTISKAKGQPREPQVYTLPPIRELMT
SNQVSLSCAVKGFYPSDIAVEWESNGQPENNYKTTPPVLDSDGSFFLVSKLTVDKSR
WQQGNVFSCSVMHEALHNHYTQKSLSLSPGKSGSETPGTSESATPESGGGDIQMTQS
PSSLSASVGDRVTITCRASQ [symbol] VAWYQQKPGKAPKLLIY [symbol] GVPSRFSGSR
SGTDFTLTISSLQPEDFATYYCQQ [symbol] TFGQGTKVEIKGTTAASGSSGGSSSGAE
VQLVESGGGLVQPGGSLRLSCAASGF [symbol] HWVRQAPGKGLEWVA [symbol]
YADSVKGRFTISADTSKNTAYLQMNSLRAEDTAVYYCAR [symbol] DYWGQ
GTLVTVSS (SEQ ID NO: 998)
CM0107 Knob (Dia-Fc-scFv)
MNLLLILTFVAAAVAEFEVQLVESGGGLVQPGGSLRLSCAASGF [symbol] HWVRQA
PGKGLEWVA [symbol] YADSVKGRFTISADTSKNTAYLQMNSLRAEDTAVYYCA
R [symbol] DYWGQGTLVTVSSGGGGSDIQMTQSPSSLSASVGDRVTITCRASQ [symbol] [symbol]
VAWYQQKPGKAPKLLIY [symbol] GVPSRFSGSRSGTDFTLTISSLQPEDFATYYC
QQ [symbol] TFGQGTKVEIKLEDKTHTKVEPKTSDKTHTCPPCPAPELLGGPSVFLFPPK
PKDTLMISRTPEVTCVVVDVSHEDPEVKFNWYVDGVEVHNAKTKPREEQYNSTYRV
VSVLTVLHQDWLNGKEYKCKVSNKALPAPIEKTISKAKGQPREPMVFDLPPSREEMT
KNQVSLWCMVKGFYPSDIAVEWESNGQPENNYKTTPPVLDSDGSFFLYSKLTVDKS
RWQQGNVFSCSVMHEALHNHYTQKSLSLSPGKSGSETPGTSESATPESGGGDIQMTQ
SPSSLSASVGDRVTITCRASQ [symbol] VAWYQQKPGKAPKLLIY [symbol] GVPSRFSGS
RSGTDFTLTISSLQPEDFATYYCQQ [symbol] TFGQGTKVEIKGTTAASGSSGGSSSGA
EVQLVESGGGLVQPGGSLRLSCAASGF [symbol] HWVRQAPGKGLEWVA [symbol] [symbol]
YADSVKGRFTISADTSKNTAYLQMNSLRAEDTAVYYCARAHYFPWAGAMDYWG
QGTLVTVSS (SEQ ID NO: 999)
CM0108 Hole (Dia-Fc-scFv)
MNLLLILTFVAAAVAEFEVQLVESGGGLVQPGGSLRLSCAASGF [symbol] HWVRQA
PGKGLEWVA [symbol] YADSVKGRFTISADTSKNTAYLQMNSLRAEDTAVYYCA
R [symbol] DYWGQGTLVTVSSGGGGSDIQMTQSPSSLSASVGDRVTITCRASQ [symbol] [symbol]
VAWYQQKPGKAPKLLIY [symbol] GVPSRFSGSRSGTDFTLTISSLQPEDFATYYC
QQ [symbol] TFGQGTKVEIKLEDKTHTKVEPKSSDKTHNCPPCPAPELLGGPSVFLFPPK
PKDTLMISRTPEVTCVVVDVSHEDPEVKFNWYVDGVEVHNAKTKPREEQYNSTYRV
VSVLTVLHQDWLNGKEYKCKVSNKALPAPIEKTISKAKGQPREPQVYTLPPIRELMT
SNQVSLSCAVKGFYPSDIAVEWESNGQPENNYKTTPPVLDSDGSFFLVSKLTVDKSR
WQQGNVFSCSVMHEALHNHYTQKSLSLSPGKSGSETPGTSESATPESGGGDIQMTQS
PSSLSASVGDRVTITCRASQ [symbol] VAWYQQKPGKAPKLLIY [symbol] GVPSRFSGSR
SGTDFTLTISSLQPEDFATYYCQQ [symbol] TFGQGTKVEIKGTTAASGSSGGSSSGAEV
QLVESGGGLVQPGGSLRLSCAASGF [symbol] HWVRQAPGKGLEWVA [symbol] Y
ADSVKGRFTISADTSKNTAYLQMNSLRAEDTAVYYCAR [symbol] DY
WGQGTLVTVSS (SEQ ID NO: 1000)
CM0108 Knob (Dia-Fc-scFv)
MNLLLILTFVAAAVAEFEVQLVESGGGLVQPGGSLRLSCAASGF [symbol] HWVRQA
PGKGLEWVA [symbol] YADSVKGRFTISADTSKNTAYLQMNSLRAEDTAVYYCA
R [symbol] DYWGQGTLVTVSSGGGGSDIQMTQSPSSLSASVGDRVTITCRASQ [symbol] [symbol]
VAWYQQKPGKAPKLLIY [symbol] GVPSRFSGSRSGTDFTLTISSLQPEDFATYYC
QQ [symbol] TFGQGTKVEIKLEDKTHTKVEPKTSDKTHTCPPCPAPELLGGPSVFLFPPK
PKDTLMISRTPEVTCVVVDVSHEDPEVKFNWYVDGVEVHNAKTKPREEQYNSTYRV
VSVLTVLHQDWLNGKEYKCKVSNKALPAPIEKTISKAKGQPREPMVFDLPPSREEMT
KNQVSLWCMVKGFYPSDIAVEWESNGQPENNYKTTPPVLDSDGSFFLYSKLTVDKS
RWQQGNVFSCSVMHEALHNHYTQKSLSLSPGKSGSETPGTSESATPESGGGDIQMTQ
SPSSLSASVGDRVTITCRASQ [symbol] VAWYQQKPGKAPKLLIY [symbol] GVPSRFSGS
RSGTDFTLTISSLQPEDFATYYCQQ [symbol] TFGQGTKVEIKGTTAASGSSGGSSSGAEV
QLVESGGGLVQPGGSLRLSCAASGF [symbol] HWVRQAPGKGLEWVA [symbol] Y
ADSVKGRFTISADTSKNTAYLQMNSLRAEDTAVYYCAR [symbol] DY
WGQGTLVTVSS (SEQ ID NO: 1001)
CM0108 Hole (Dia-Fc-scFv)
MNLLLILTFVAAAVAEFEVQLVESGGGLVQPGGSLRLSCAASGF [symbol] HWVRQA
PGKGLEWVA [symbol] YADSVKGRFTISADTSKNTAYLQMNSLRAEDTAVYYCA
R [symbol] DYWGQGTLVTVSSGGGGSDIQMTQSPSSLSASVGDRVTITCRASQ [symbol] [symbol]
VAWYQQKPGKAPKLLIY [symbol] GVPSRFSGSRSGTDFTLTISSLQPEDFATYYC
QQ [symbol] TFGQGTKVEIKLEDKTHTKVEPKSSDKTHNCPPCPAPELLGGPSVFLFPPK
PKDTLMISRTPEVTCVVVDVSHEDPEVKFNWYVDGVEVHNAKTKPREEQYNSTYRV
VSVLTVLHQDWLNGKEYKCKVSNKALPAPIEKTISKAKGQPREPQVYTLPPIRELMT
SNQVSLSCAVKGFYPSDIAVEWESNGQPENNYKTTPPVLDSDGSFFLVSKLTVDKSR
WQQGNVFSCSVMHEALHNHYTQKSLSLSPGKSGSETPGTSESATPESGGGDIQMTQS
PSSLSASVGDRVTITCRASQ [symbol] VAWYQQKPGKAPKLLIY [symbol] GVPSRFSGSR
SGTDFTLTISSLQPEDFATYYCQQ [symbol] TFGQGTKVEIKGTTAASGSSGGSSSGAEV
QLVESGGGLVQPGGSLRLSCAASGF [symbol] HWVRQAPGKGLEWVASIYSSYGYTSY
ADSVKGRFTISADTSKNTAYLQMNSLRAEDTAVYYCARTVRGSKKPYFSGWAMDY
WGQGTLVTVSS (SEQ ID NO: 1000)
CM0108 Knob (Dia-Fc-scFv)
MNLLLILTFVAAAVAEFEVQLVESGGGLVQPGGSLRLSCAASGF [symbol] HWVRQA
PGKGLEWVA [symbol] YADSVKGRFTISADTSKNTAYLQMNSLRAEDTAVYYCA
R [symbol] DYWGQGTLVTVSSGGGGSDIQMTQSPSSLSASVGDRVTITCRASQ [symbol] [symbol]
VAWYQQKPGKAPKLLIY [symbol] GVPSRFSGSRSGTDFTLTISSLQPEDFATYYC
QQ [symbol] TFGQGTKVEIKLEDKTHTKVEPKTSDKTHTCPPCPAPELLGGPSVFLFPPK
PKDTLMISRTPEVTCVVVDVSHEDPEVKFNWYVDGVEVHNAKTKPREEQYNSTYRV
VSVLTVLHQDWLNGKEYKCKVSNKALPAPIEKTISKAKGQPREPMVFDLPPSREEMT
KNQVSLWCMVKGFYPSDIAVEWESNGQPENNYKTTPPVLDSDGSFFLYSKLTVDKS
RWQQGNVFSCSVMHEALHNHYTQKSLSLSPGKSGSETPGTSESATPESGGGDIQMTQ
SPSSLSASVGDRVTITCRASQ [symbol] VAWYQQKPGKAPKLLIY [symbol] GVPSRFSGS
RSGTDFTLTISSLQPEDFATYYCQQ [symbol] TFGQGTKVEIKGTTAASGSSGGSSSGAEV
QLVESGGGLVQPGGSLRLSCAASGF [symbol] HWVRQAPGKGLEWVA [symbol] Y
ADSVKGRFTISADTSKNTAYLQMNSLRAEDTAVYYCAR [symbol] DY
WGQGTLVTVSS (SEQ ID NO: 1001)
CM0109 Hole (Dia-Fc-scFv)
MNLLLILTFVAAAVAEFEVQLVESGGGLVQPGGSLRLSCAASGF [symbol] HWVRQA
PGKGLEWVA [symbol] YADSVKGRFTISADTSKNTAYLQMNSLRAEDTAVYYCA
R [symbol] DYWGQGTLVTVSSGGGGSDIQMTQSPSSLSASVGDRVTITCRASQ [symbol] [symbol]
VAWYQQKPGKAPKLLIY [symbol] GVPSRFSGSRSGTDFTLTISSLQPEDFATYYC
QQ [symbol] TFGQGTKVEIKLEDKTHTKVEPKSSDKTHNCPPCPAPELLGGPSVFLFPPK
PKDTLMISRTPEVTCVVVDVSHEDPEVKFNWYVDGVEVHNAKTKPREEQYNSTYRV
VSVLTVLHQDWLNGKEYKCKVSNKALPAPIEKTISKAKGQPREPQVYTLPPIRELMT
SNQVSLSCAVKGFYPSDIAVEWESNGQPENNYKTTPPVLDSDGSFFLVSKLTVDKSR
WQQGNVFSCSVMHEALHNHYTQKSLSLSPGKSGSETPGTSESATPESGGGDIQMTQS
PSSLSASVGDRVTITCRASQ [symbol] VAWYQQKPGKAPKLLIY [symbol] GVPSRFSGSR
SGTDFTLTISSLQPEDFATYYCQQ [symbol] TFGQGTKVEIKGTTAASGSSGGSSSGAEV
QLVESGGGLVQPGGSLRLSCAASGF [symbol] HWVRQAPGKGLEWVASIYSSYGYTSY
ADSVKGRFTISADTSKNTAYLQMNSLRAEDTAVYYCARTVRGSKKPYFSGWAMDY
WGQGTLVTVSS (SEQ ID NO: 1000)
CM0109 Knob (Dia-Fc-scFv)
MNLLLILTFVAAAVAEFEVQLVESGGGLVQPGGSLRLSCAASGF [symbol] HWVRQA
PGKGLEWVA [symbol] YADSVKGRFTISADTSKNTAYLQMNSLRAEDTAVYYCA
R [symbol] DYWGQGTLVTVSSGGGGSDIQMTQSPSSLSASVGDRVTITCRASQ [symbol] [symbol]
VAWYQQKPGKAPKLLIY [symbol] GVPSRFSGSRSGTDFTLTISSLQPEDFATYYC
QQ [symbol] TFGQGTKVEIKLEDKTHTKVEPKTSDKTHTCPPCPAPELLGGPSVFLFPPK
PKDTLMISRTPEVTCVVVDVSHEDPEVKFNWYVDGVEVHNAKTKPREEQYNSTYRV
VSVLTVLHQDWLNGKEYKCKVSNKALPAPIEKTISKAKGQPREPMVFDLPPSREEMT
KNQVSLWCMVKGFYPSDIAVEWESNGQPENNYKTTPPVLDSDGSFFLYSKLTVDKS
RWQQGNVFSCSVMHEALHNHYTQKSLSLSPGKSGSETPGTSESATPESGGGDIQMTQ
SPSSLSASVGDRVTITCRASQ [symbol] VAWYQQKPGKAPKLLIY [symbol] GVPSRFSGS
RSGTDFTLTISSLQPEDFATYYCQQ [symbol] TFGQGTKVEIKGTTAASGSSGGSSSGA
EVQLVESGGGLVQPGGSLRLSCAASGF [symbol] HWVRQAPGKGLEWVA [symbol] [symbol]
YADSVKGRFTISADTSKNTAYLQMNSLRAEDTAVYYCARAHYFPWAGAMDYWG
QGTLVTVSS (SEQ ID NO: 999)
CT003 Hole (Dia-Fc-scFv)
MNLLLILTFVAAAVAEFEVQLVESGGGLVQPGGSLRLSCAASGF [symbol] HWVRQA
PGKGLEWVA [symbol] YADSVKGRFTISADTSKNTAYLQMNSLRAEDTAVYYCA
R [symbol] DYWGQGTLVTVSSGGGGSDIQMTQSPSSLSASVGDRVTIT
CRASQ [symbol] VAWYQQKPGKAPKLLIY [symbol] GVPSRFSGSRSGTDFTLTISSLQPE
DFATYYCQQ [symbol] TFGQGTKVEIKLEDKTHTKVEPKSSDKTHNCPPCPAPELLGG
PSVFLFPPKPKDTLMISRTPEVTCVVVDVSHEDPEVKFNWYVDGVEVHNAKTKPREE
QYNSTYRVVSVLTVLHQDWLNGKEYKCKVSNKALPAPIEKTISKAKGQPREPQVYT
LPPIRELMTSNQVSLSCAVKGFYPSDIAVEWESNGQPENNYKTTPPVLDSDGSFFLVS
KLTVDKSRWQQGNVFSCSVMHEALHNHYTQKSLSLSPGKSGSETPGTSESATPESGG
GEVQLVESGGGLVQPGGSLRLSCAASGF [symbol] HWVRQAPGKGLEWVA [symbol] [symbol]
YADSVKGRFTISADTSKNTAYLQMNSLRAEDTAVYYCAR [symbol] DYWGQ
GTLVTVSSGTTAASGSSGGSSSGADIQMTQSPSSLSASVGDRVTITCRASQ [symbol] VA
WYQQKPGKAPKLLIY [symbol] GVPSRFSGSRSGTDFTLTISSLQPEDFATYYCQQ [symbol] [symbol]
TFGQGTKVEIK (SEQ ID NO: 1002)
CT003 Knob (Dia-Fc-scFv)
MNLLLILTFVAAAVAEFEVQLVESGGGLVQPGGSLRLSCAASGF [symbol] HWVRQAP
GKGLEWVA [symbol] YADSVKGRFTISADTSKNTAYLQMNSLRAEDTAVYYCA
R [symbol] DYWGQGTLVTVSSGGGGDIQMTQSPSSLSASVGDRVTITCRASQ [symbol] [symbol]
VAWYQQKPGKAPKLLIY [symbol] GVPSRFSGSRSGTDFTLTISSLQPEDFATYY
CQQ [symbol] TFGQGTKVEIKLEDKTHTKVEPKTSDKTHTCPPCPAPELLGGPSVFLFPP
KPKDTLMISRTPEVTCVVVDVSHEDPEVKFNWYVDGVEVHNAKTKPREEQYNSTYR
VVSVLTVLHQDWLNGKEYKCKVSNKALPAPIEKTISKAKGQPREPMVFDLPPSREEM
TKNQVSLWCMVKGFYPSDIAVEWESNGQPENNYKTTPPVLDSDGSFFLYSKLTVDK
SRWQQGNVFSCSVMHEALHNHYTQKSLSLSPGKSGSETPGTSESATPESGGGEVQLV
ESGGGLVQPGGSLRLSCAASGF [symbol] HWVRQAPGKGLEWVA [symbol] AD
SVKGRFTISADTSKNTAYLQMNSLRAEDTAVYYCAR [symbol] DYWGQGTLVT
VSSGTTAASGSSGGSSSGADIQMTQSPSSLSASVGDRVTITCRASQ [symbol] VAWYQQK
PGKAPKLLIY [symbol] GVPSRFSGSRSGTDFTLTISSLQPEDFATYYCQQ [symbol] TFG
QGTKVEIK (SEQ ID NO: 1003)
CM0112 Hole (scFv-Fc-Dia)
MNLLLILTFVAAAVAEFDIQMTQSPSSLSASVGDRVTITCRASQ [symbol] VAWYQQKP
GKAPKLLIY [symbol] GVPSRFSGSRSGTDFTLTISSLQPEDFATYYCQQ [symbol] TFGQ
GTKVEIKGTTAASGSSGGSSSGAEVQLVESGGGLVQPGGSLRLSCAASGF [symbol] H
WVRQAPGKGLEWVA [symbol] YADSVKGRFTISADTSKNTAYLQMNSLRAEDT
AVYYCAR [symbol] DYWGQGTLVTVSSLEDKTHTKVEPKSSDKTHNCPPCPAPE
LLGGPSVFLFPPKPKDTLMISRTPEVTCVVVDVSHEDPEVKFNWYVDGVEVHNAKT
KPREEQYNSTYRVVSVLTVLHQDWLNGKEYKCKVSNKALPAPIEKTISKAKGQPREP
QVYTLPPIRELMTSNQVSLSCAVKGFYPSDIAVEWESNGQPENNYKTTPPVLDSDGSF
FLVSKLTVDKSRWQQGNVFSCSVMHEALHNHYTQKSLSLSPGKSGSETPGTSESATP
ESGGGEVQLVESGGGLVQPGGSLRLSCAASGF [symbol] HWVRQAPGKGLEWVA [symbol] [symbol]
YADSVKGRFTISADTSKNTAYLQMNSLRAEDTAVYYCAR [symbol] [symbol]
DYWGQGTLVTVSSGGGGSDIQMTQSPSSLSASVGDRVTITCRASQ [symbol] VA
WYQQKPGKAPKLLIY [symbol] GVPSRFSGSRSGTDFTLTISSLQPEDFATYYCQQ [symbol] [symbol]
TFGQGTKVEIK (SEQ ID NO: 1004)
CM0112 Knob (scFv-Fc-Dia)
MNLLLILTFVAAAVAEFDIQMTQSPSSLSASVGDRVTITCRASQ [symbol] VAWYQQKP
GKAPKLLIY [symbol] GVPSRFSGSRSGTDFTLTISSLQPEDFATYYCQQ [symbol] TFGO
GTKVEIKGTTAASGSSGGSSSGAEVQLVESGGGLVQPGGSLRLSCAASGF [symbol] H
WVRQAPGKGLEWVA [symbol] YADSVKGRFTISADTSKNTAYLQMNSLRAEDT
AVYYCAR [symbol] DYWGQGTLVTVSSLEDKTHTKVEPKTSDKTHTCPPCPAPE
LLGGPSVFLFPPKPKDTLMISRTPEVTCVVVDVSHEDPEVKFNWYVDGVEVHNAKT
KPREEQYNSTYRVVSVLTVLHQDWLNGKEYKCKVSNKALPAPIEKTISKAKGQPREP
MVFDLPPSREEMTKNQVSLWCMVKGFYPSDIAVEWESNGQPENNYKTTPPVLDSDG
SFFLYSKLTVDKSRWQQGNVFSCSVMHEALHNHYTQKSLSLSPGKSGSETPGTSESA
TPESGGGEVQLVESGGGLVQPGGSLRLSCAASGF [symbol] HWVRQAPGKGLEWVA [symbol] [symbol]
YADSVKGRFTISADTSKNTAYLQMNSLRAEDTAVYYCAR [symbol] [symbol]
DYWGQGTLVTVSSGGGGSDIQMTQSPSSLSASVGDRVTITCRASQ [symbol] VAWY
QQKPGKAPKLLIY [symbol] GVPSRFSGSRSGTDFTLTISSLQPEDFATYYCQQ [symbol]
TFGQGTKVEIK (SEQ ID NO: 1005)
CM0110 Hole (scFv-Fc-scFv)
MNLLLILTFVAAAVAEFDIQMTQSPSSLSASVGDRVTITCRASQ [symbol] VAWYQQKP
GKAPKLLIY [symbol] GVPSRFSGSRSGTDFTLTISSLQPEDFATYYCQQ [symbol] TFGQ
GTKVEIKGTTAASGSSGGSSSGAEVQLVESGGGLVQPGGSLRLSCAASGF [symbol] H
WVRQAPGKGLEWVA [symbol] YADSVKGRFTISADTSKNTAYLQMNSLRAEDT
AVYYCAR [symbol] DYWGQGTLVTVSSLEDKTHTKVEPKSSDKTHNCPPCPAPE
LLGGPSVFLFPPKPKDTLMISRTPEVTCVVVDVSHEDPEVKFNWYVDGVEVHNAKT
KPREEQYNSTYRVVSVLTVLHQDWLNGKEYKCKVSNKALPAPIEKTISKAKGQPREP
QVYTLPPIRELMTSNQVSLSCAVKGFYPSDIAVEWESNGQPENNYKTTPPVLDSDGSF
FLVSKLTVDKSRWQQGNVFSCSVMHEALHNHYTQKSLSLSPGKSGSETPGTSESATP
ESGGGDIQMTQSPSSLSASVGDRVTITCRASQ [symbol] VAWYQQKPGKAPKLLIY [symbol] [symbol]
GVPSRFSGSRSGTDFTLTISSLQPEDFATYYCQQ [symbol] TFGQGTKVEIKGTTAAS
GSSGGSSSGAEVQLVESGGGLVQPGGSLRLSCAASGF [symbol] HWVRQAPGKGLEW
VA [symbol] YADSVKGRFTISADTSKNTAYLQMNSLRAEDTAVYYCAR [symbol] [symbol]
DYWGQGTLVTVSS (SEQ ID NO: 1006)
CM0110 Knob (scFv-Fc-scFv)
MNLLLILTFVAAAVAEFDIQMTQSPSSLSASVGDRVTITCRASQ [symbol] VAWYQQKP
GKAPKLLIY [symbol] GVPSRFSGSRSGTDFTLTISSLQPEDFATYYCQQ [symbol] TFGQ
GTKVEIKGTTAASGSSGGSSSGAEVQLVESGGGLVQPGGSLRLSCAASGF [symbol] H
WVRQAPGKGLEWVA [symbol] YADSVKGRFTISADTSKNTAYLQMNSLRAEDT
AVYYCAR [symbol] DYWGQGTLVTVSSLEDKTHTKVEPKTSDKTHTCPPCPAPE
LLGGPSVFLFPPKPKDTLMISRTPEVTCVVVDVSHEDPEVKFNWYVDGVEVHNAKT
KPREEQYNSTYRVVSVLTVLHQDWLNGKEYKCKVSNKALPAPIEKTISKAKGQPREP
MVFDLPPSREEMTKNQVSLWCMVKGFYPSDIAVEWESNGQPENNYKTTPPVLDSDG
SFFLYSKLTVDKSRWQQGNVFSCSVMHEALHNHYTQKSLSLSPGKSGSETPGTSESA
TPESGGGDIQMTQSPSSLSASVGDRVTITCRASQ [symbol] VAWYQQKPGKAPKLLIY [symbol] [symbol]
GVPSRFSGSRSGTDFTLTISSLQPEDFATYYCQQ [symbol] TFGQGTKVEIKGTT
AASGSSGGSSSGAEVQLVESGGGLVQPGGSLRLSCAASGF [symbol] HWVRQAPGKG
LEWVA [symbol] YADSVKGRFTISADTSKNTAYLQMNSLRAEDTAVYYCAR [symbol] [symbol]
DYWGQGTLVTVSS (SEQ ID NO: 1007)
CT001 CM0299 CM0300 CM0301 ANTI LC
MNLLLILTFVAAAVADIQMTQSPSSLSASVGDRVTITCRASQ [symbol] VAWYQQKPGK
APKLLIY [symbol] GVPSRFSGSRSGTDFTLTISSLQPEDFATYYCQQ [symbol] TFGQGT
KVEIKRTVAAPSVFIFPPSDEQLKSGTASVVCLLNNFYPREAKVQWKVDNALQSGNS
QESVTEQDSKDSTYSLSSTLTLSKADYEKHKVYACEVTHQGLSSPVTKSFNRGEC
(SEQ ID NO: 1008)
CT001 Hole (bsIgG-dia)
MNLLLILTFVAAAVAEVQLVESGGGLVQPGGSLRLSCAASGF [symbol] HWVRQAPG
KGLEWVA [symbol] ADSVKGRFTISADTSKNTAYLQMNSLRAEDTAVYYCAR [symbol]
DYWGQGTLVTVSSASTKGPSVFPLAPSSKSTSGGTAALGCLVKDYFPE
PVTVSWNSGALTSGVHTFPAVLQSSGLYSLSSVVTVPSSSLGTQTYICNVNHKPSNTK
VDKKVEPKSCDKTHTCPPCPAPELLGGPSVFLFPPKPKDTLMISRTPEVTCVVVDVSH
EDPEVKFNWYVDGVEVHNAKTKPREEQYNSTYRVVSVLTVLHQDWLNGKEYKCK
VSNKALPAPIEKTISKAKGQPREPQVYTLPPIRELMTSNQVSLSCAVKGFYPSDIAVE
WESNGQPENNYKTTPPVLDSDGSFFLVSKLTVDKSRWQQGNVFSCSVMHEALHNH
YTQKSLSLSPGKSGSETPGTSESATPESGGGEVQLVESGGGLVQPGGSLRLSCAASGF [symbol]
HWVRQAPGKGLEWVA [symbol] YADSVKGRFTISADTSKNTAYLQMN
SLRAEDTAVYYCAR [symbol] DYWGQGTLVTVSSGGGGSDIQMTQSP
SSLSASVGDRVTITCRASQ [symbol] VAWYQQKPGKAPKLLIY [symbol] GVPSRFSGSRS
GTDFTLTISSLQPEDFATYYCQQ [symbol] TFGQGTKVEIK (SEQ ID NO: 1009)
CT001 Knob (bsIgG-dia)
MNLLLILTFVAAAVAEVQLVESGGGLVQPGGSLRLSCAASGF [symbol] HWVRQAPG
KGLEWVA [symbol] ADSVKGRFTISADTSKNTAYLQMNSLRAEDTAVYYCAR [symbol]
DYWGQGTLVTVSSASTKGPSVFPLAPSSKSTSGGTAALGCLVKDYFPE
PVTVSWNSGALTSGVHTFPAVLQSSGLYSLSSVVTVPSSSLGTQTYICNVNHKPSNTK
VDKKVEPKSCDKTHTCPPCPAPELLGGPSVFLFPPKPKDTLMISRTPEVTCVVVDVSH
EDPEVKFNWYVDGVEVHNAKTKPREEQYNSTYRVVSVLTVLHQDWLNGKEYKCK
VSNKALPAPIEKTISKAKGQPREPMVFDLPPSREEMTKNQVSLWCMVKGFYPSDIAV
EWESNGQPENNYKTTPPVLDSDGSFFLYSKLTVDKSRWQQGNVFSCSVMHEALHNH
YTQKSLSLSPGKSGSETPGTSESATPESGGGEVQLVESGGGLVQPGGSLRLSCAASGF [symbol]
HWVRQAPGKGLEWVA [symbol] YADSVKGRFTISADTSKNTAYLQMN
SLRAEDTAVYYCAR [symbol] DYWGQGTLVTVSSGGGGSDIQMTQSPSSLSA
SVGDRVTITCRASQ [symbol] VAWYQQKPGKAPKLLIY [symbol] GVPSRFSGSRSGTDF
TLTISSLQPEDFATYYCQQ [symbol] TFGQGTKVEIK (SEQ ID NO: 1010)
CMQ299 Hc (IgG-Dia)
MNLLLILTFVAAAVAEVQLVESGGGLVQPGGSLRLSCAASGF [symbol] HWVRQAPG
KGLEWVA [symbol] ADSVKGRFTISADTSKNTAYLQMNSLRAEDTAVYYCAR [symbol]
DYWGQGTLVTVSSASTKGPSVFPLAPSSKSTSGGTAALGCLVKDYFPE
PVTVSWNSGALTSGVHTFPAVLQSSGLYSLSSVVTVPSSSLGTQTYICNVNHKPSNTK
VDKKVEPKSCDKTHTCPPCPAPELLGGPSVFLFPPKPKDTLMISRTPEVTCVVVDVSH
EDPEVKFNWYVDGVEVHNAKTKPREEQYNSTYRVVSVLTVLHQDWLNGKEYKCK
VSNKALPAPIEKTISKAKGQPREPQVYTLPPSREEMTKNQVSLTCLVKGFYPSDIAVE
WESNGQPENNYKTTPPVLDSDGSFFLYSKLTVDKSRWQQGNVFSCSVMHEALHNH
YTQKSLSLSPGKSGSETPGTSESATPESGGGEVQLVESGGGLVQPGGSLRLSCAASGF [symbol]
HWVRQAPGKGLEWVA [symbol] YADSVKGRFTISADTSKNTAYLQMN
SLRAEDTAVYYCAR [symbol] DYWGQGTLVTVSSGGGGSDIQMTQSPSSLSA
SVGDRVTITCRASQ [symbol] VAWYQQKPGKAPKLLIY [symbol] GVPSRFSGSRSGTDF
TLTISSLQPEDFATYYCQQ [symbol] FTFGQGTKVEIK (SEQ ID NO: 1011)
CM0300 Hc (IgG-scFv)
MNLLLILTFVAAAVAEVQLVESGGGLVQPGGSLRLSCAASGF [symbol] HWVRQAPG
KGLEWVA [symbol] ADSVKGRFTISADTSKNTAYLQMNSLRAEDTAVYYCAR [symbol]
DYWGQGTLVTVSSASTKGPSVFPLAPSSKSTSGGTAALGCLVKDYFPE
PVTVSWNSGALTSGVHTFPAVLQSSGLYSLSSVVTVPSSSLGTQTYICNVNHKPSNTK
VDKKVEPKSCDKTHTCPPCPAPELLGGPSVFLFPPKPKDTLMISRTPEVTCVVVDVSH
EDPEVKFNWYVDGVEVHNAKTKPREEQYNSTYRVVSVLTVLHQDWLNGKEYKCK
VSNKALPAPIEKTISKAKGQPREPQVYTLPPSREEMTKNQVSLTCLVKGFYPSDIAVE
WESNGQPENNYKTTPPVLDSDGSFFLYSKLTVDKSRWQQGNVFSCSVMHEALHNH
YTQKSLSLSPGKSGSETPGTSESATPESGGGDIQMTQSPSSLSASVGDRVTITCRASQ [symbol]
VAWYQQKPGKAPKLLIY [symbol] GVPSRFSGSRSGTDFTLTISSLQPEDFATYY
CQQ [symbol] TFGQGTKVEIKGTTAASGSSGGSSSGAEVQLVESGGGLVQPGGSLRLS
CAASGF [symbol] HWVRQAPGKGLEWVA [symbol] YADSVKGRFTISADTSKNTA
YLQMNSLRAEDTAVYYCAR [symbol] DYWGQGTLVTVSS (SEQ ID NO:
1012)
CM0301 Hc (IgG-scFv)
MNLLLILTFVAAAVAEVQLVESGGGLVQPGGSLRLSCAASGF [symbol] HWVRQAPG
KGLEWVA [symbol] ADSVKGRFTISADTSKNTAYLQMNSLRAEDTAVYYCAR [symbol]
DYWGQGTLVTVSSASTKGPSVFPLAPSSKSTSGGTAALGCLVKDYFPE
PVTVSWNSGALTSGVHTFPAVLQSSGLYSLSSVVTVPSSSLGTQTYICNVNHKPSNTK
VDKKVEPKSCDKTHTCPPCPAPELLGGPSVFLFPPKPKDTLMISRTPEVTCVVVDVSH
EDPEVKFNWYVDGVEVHNAKTKPREEQYNSTYRVVSVLTVLHQDWLNGKEYKCK
VSNKALPAPIEKTISKAKGQPREPQVYTLPPSREEMTKNQVSLTCLVKGFYPSDIAVE
WESNGQPENNYKTTPPVLDSDGSFFLYSKLTVDKSRWQQGNVFSCSVMHEALHNH
YTQKSLSLSPGKSGSETPGTSESATPESGGGDIQMTQSPSSLSASVGDRVTITCRASQ [symbol]
VAWYQQKPGKAPKLLIY [symbol] GVPSRFSGSRSGTDFTLTISSLQPEDFATYY
CQQ [symbol] TFGQGTKVEIKGTTAASGSSGGSSSGAEVQLVESGGGLVQPGGSLRLSC
AASGF [symbol] HWVRQAPGKGLEWVA [symbol] YADSVKGRFTISADTSKNTAY
LQMNSLRAEDTAVYYCAR [symbol] DYWGQGTLVTVSS (SEQ ID NO:
1013)
ANTI Hole (Dia-Fc-Fab)
MNLLLILTFVAAAVAEFEVQLVESGGGLVQPGGSLRLSCAASGF [symbol] HWVRQA
PGKGLEWVA [symbol] YADSVKGRFTISADTSKNTAYLQMNSLRAEDTAVYYCA
R [symbol] DYWGQGTLVTVSSGGGGSDIQMTQSPSSLSASVGDRVTIT
CRASQ [symbol] VAWYQQKPGKAPKLLIY [symbol] GVPSRFSGSRSGTDFTLTISSLQPE
DFATYYCQQ [symbol] TFGQGTKVEIKLEDKTHTKVEPKSSDKTHNCPPCPAPELLGGPS
VFLFPPKPKDTLMISRTPEVTCVVVDVSHEDPEVKFNWYVDGVEVHNAKTKPREEQ
YNSTYRVVSVLTVLHQDWLNGKEYKCKVSNKALPAPIEKTISKAKGQPREPQVYTLP
PIRELMTSNQVSLSCAVKGFYPSDIAVEWESNGQPENNYKTTPPVLDSDGSFFLVSKL
TVDKSRWQQGNVFSCSVMHEALHNHYTQKSLSLSPGKSGSETPGTSESATPESGGGE
VQLVESGGGLVQPGGSLRLSCAASGF [symbol] HWVRQAPGKGLEWVA [symbol] [symbol]
YADSVKGRFTISADTSKNTAYLQMNSLRAEDTAVYYCAR [symbol] DYWGQG
TLVTVSSASTKGPSVFPLAPSSKSTSGGTAALGCLVKDYFPEPVTVSWNSGALTSGV
HTFPAVLQSSGLYSLSSVVTVPSSSLGTQTYICNVNHKPSNTKVDKKVEPKSCDKTHT
(SEQ ID NO: 1014)
ANTI Knob (Dia-Fc-Fab)
MNLLLILTFVAAAVAEFEVQLVESGGGLVQPGGSLRLSCAASGF [symbol] HWVRQAP
GKGLEWVA [symbol] YADSVKGRFTISADTSKNTAYLQMNSLRAEDTAVYYCA
R [symbol] DYWGQGTLVTVSSGGGGSDIQMTQSPSSLSASVGDRVTITCRASQ [symbol] [symbol]
VAWYQQKPGKAPKLLIY [symbol] GVPSRFSGSRSGTDFTLTISSLQPEDFATYY
CQ [symbol] TFGQGTKVEIKLEDKTHTKVEPKTSDKTHTCPPCPAPELLGGPSVFLFPP
KPKDTLMISRTPEVTCVVVDVSHEDPEVKFNWYVDGVEVHNAKTKPREEQYNSTYR
VVSVLTVLHQDWLNGKEYKCKVSNKALPAPIEKTISKAKGQPREPMVFDLPPSREEM
TKNQVSLWCMVKGFYPSDIAVEWESNGQPENNYKTTPPVLDSDGSFFLYSKLTVDK
SRWQQGNVFSCSVMHEALHNHYTQKSLSLSPGKSGSETPGTSESATPESGGGEVQLV
ESGGGLVQPGGSLRLSCAASGF [symbol] HWVRQAPGKGLEWVA [symbol] YAD
SVKGRFTISADTSKNTAYLQMNSLRAEDTAVYYCA [symbol] DYWGQGTLVT
VSSASTKGPSVFPLAPSSKSTSGGTAALGCLVKDYFPEPVTVSWNSGALTSGVHTFPA
VLQSSGLYSLSSVVTVPSSSLGTQTYICNVNHKPSNTKVDKKVEPKSCDKTHT (SEQ
ID NO: 1015)
Fab-Dia Hc (Fab-Dia)
MNLLLILTFVAAAVAEVQLVESGGGLVQPGGSLRLSCAASGF [symbol] HWVRQAPG
KGLEWVA [symbol] YADSVKGRFTISADTSKNTAYLQMNSLRAEDTAVYYCAR [symbol]
DYWGQGTLVTVSSASTKGPSVFPLAPSSKSTSGGTAALGCLVKDYFPE
PVTVSWNSGALTSGVHTFPAVLQSSGLYSLSSVVTVPSSSLGTQTYICNVNHKPSNTK
VDKKVEPKSCDKTHTGGSGGEVQLVESGGGLVQPGGSLRLSCAASGF [symbol] HWV
RQAPGKGLEWVA [symbol] YADSVKGRFTISADTSKNTAYLQMNSLRAEDTAV
YYCAR [symbol] DYWGQGTLVTVSSGGGGSDIQMTQSPSSLSASVGDRVTITC
RASQ [symbol] VAWYQQKPGKAPKLLIY [symbol] GVPSRFSGSRSGTDFTLTISSLQPED
FATYYCQQ [symbol] TFGQGTKVEIK (SEQ ID NO: 1016)
Fab-Dia LC (Fab-Dia)
MNLLLILTFVAAAVADIQMTQSPSSLSASVGDRVTITCRASQ [symbol] VAWYQQKPGK
APKLLIY [symbol] GVPSRFSGSRSGTDFTLTISSLQPEDFATYYCQQ [symbol] TFGQGT
KVEIKRTVAAPSVFIFPPSDEQLKSGTASVVCLLNNFYPREAKVQWKVDNALQSGNS
QESVTEQDSKDSTYSLSSTLTLSKADYEKHKVYACEVTHQGLSSPVTKSFNRGECGG
GGSEVQLVESGGGLVQPGGSLRLSCAASGF [symbol] HWVRQAPGKGLEWVA [symbol] [symbol]
YADSVKGRFTISADTSKNTAYLQMNSLRAEDTAVYYCAR [symbol] [symbol]
DYWGQGTLVTVSSGGGGSDIQMTQSPSSLSASVGDRVTITCRASQ [symbol] VAWY
QQKPGKAPKLLIY [symbol] GVPSRFSGSRSGTDFTLTISSLQPEDFATYYCQQ [symbol] T
FGQGTKVEIK (SEQ ID NO: 1017)
CH3 (Dia-CH3-Dia)
MNLLLILTFVAAAVAEFEVQLVESGGGLVQPGGSLRLSCAASGF [symbol] HWVRQA
PGKGLEWVA [symbol] YADSVKGRFTISADTSKNTAYLQMNSLRAEDTAVYYCA
R [symbol] DYWGQGTLVTVSSGGGGSDIQMTQSPSSLSASVGDRVTITCRASQ [symbol] [symbol]
VAWYQQKPGKAPKLLIY [symbol] GVPSRFSGSRSGTDFTLTISSLQPEDFATYYC
QQ [symbol] TFGQGTKVEIKDKTHTKVEPKTSDKTHTCPPCPGQPREPQVYTLPPSREE
MTKNQVSLTCLVKGFYPSDIAVEWESNGQPENNYKTTPPVLDSDGSFFLYSKLTVDK
SRWQQGNVFSCSVMHEALHNHYTQKSLSLSPGKGTTAASGSSGGSSSGAGRTEVQL
VESGGGLVQPGGSLRLSCAASGF [symbol] HWVRQAPGKGLEWVA [symbol] YA
DSVKGRFTISADTSKNTAYLQMNSLRAEDTAVYYCAR [symbol] DYWGQGTL
VTVSSGGGGSDIQMTQSPSSLSASVGDRVTITCRASQ [symbol] VAWYQQKPGKAPKLLI
YSASSFFSGVPSRFSGSRSGTDFTLTISSLQPEDFATYYCQQ [symbol] TFGQGTKVEIK
(SEQ ID NO: 1018)
CM0156
EVQLVESGGGLVQPGGSLRLSCAASGF [symbol] HWVRQAPGKGLEWVA [symbol] [symbol]
YADSVKGRFTISADTSKNTAYLQMNSLRAEDTAVYYCAR [symbol]
DYWGQGTLVTVSSGGGGSDIQMTQSPSSLSASVGDRVTITCRASQ [symbol] VAWYQQ
KPGKAPKLLIY [symbol] GVPSRFSGSRSGTDFTLTISSLQPEDFATYYCQQ [symbol] TF
GQGTKVEIKLEDKTHTKVEPKSSDKTHTCPPCPAPELLGGPSVFLFPPKPKDTLMISRT
PEVTCVVVDVSHEDPEVKFNWYVDGVEVHNAKTKPREEQYNSTYRVVSVLTVLHQ
DWLNGKEYKCKVSNKALPAPIEKTISKAKGQPREPQVYTLPPSREEMTKNQVSLTCL
VKGFYPSDIAVEWESNGQPENNYKTTPPVLDSDGSFFLYSKLTVDKSRWQQGNVFSC
SVMHEALHNHYTQKSLSLSPGKSGSETPGTSESATPESGGGEVQLVESGGGLVQPGG
SLRLSCAASGF [symbol] HWVRQAPGKGLEWVA [symbol] YADSVKGRFTISADT
SKNTAYLQMNSLRAEDTAVYYCAR [symbol] DYWGQGTLVTVSSGGG
GSDIQMTQSPSSLSASVGDRVTITCRASQ [symbol] VAWYQQKPGKAPKLLIY [symbol]
GVPSRFSGSRSGTDFTLTISSLQPEDFATYYCQQ [symbol] TFGQGTKVEIK (SEQ ID
NO: 1019)

TABLE 20
Comparison of expression titers and monodispersity of FZD agonists
following Protein A purification. See corresponding FIG. 21.

| | | N-term | C-term | Expression | |
|---|---|---|---|---|---|
| Molecule | Format | Paratope | Paratope | Titer mg/l | [symbol] |
| CM0042 | Dia - Fc- Dia | 5019 | 2539 | 8 ± 4 | [symbol] |
| CM0011 | Dia - Fc- Dia | 5019 | 2539/2542 | 12 ± 3 | [symbol] |
| CM0126 | Dia - Fc- Dia | 5016 | 2539/2542 | 8 ± 0.7 | [symbol] |
| CM0107 | Dia - Fc - scFv | 5019 | 2539 | 90 | [symbol] |
| CM0108 | Dia - Fc - scFv | 5019 | 2542 | 47 | [symbol] |
| CM0109 | Dia - Fc - scFv | 5019 | 2539/2542 | 79 | [symbol] |
| CT003 | Dia - Fc - scFv | 2539/2542 | 5016 | 47 | [symbol] |
| CM0112 | scFv - Fc - Dia | 5019 | 2539/2542 | 15 | [symbol] |
| CM0110 | scFv - Fc - scFv | 5019 | 2539/2542 | 82 | [symbol] |
| CT001 | bslgG-dia | 5016 | 2539/2542 | 47 ± 21 | [symbol] |
| CM0299 | lgG-dia | 5016 | 2539 | 20 ± 8 | [symbol] |
| CM0300 | lgG - scFv | 5016 | 2539 | 134 ± 38 | [symbol] |
| CM0301 | lgG - scFv | 5016 | 2542 | 134 ± 27 | [symbol] |
| ANT1 | Dia-Fc-Fab | 5016 | 2539/2542 | 294 ± 75 | [symbol] |
| CH3 | Dia-CH3-Dia | 5019 | 2539 | <1 | [symbol] |
| Fab-Dia | FAb-Dia | 5016 | 2540/2542 | 1 | [symbol] |

[symbol]

indicates data missing or illegible when filed

TABLE 21
Functional comparison of FZD agonists. Concentration-response curves of each
FZD agonist were generated using the TOPFLASH assay. FIG. 20 shows representative
traces of the A) Diabody-Fc-Diabody and B) Diabody-Fc-Fab format overlaid with
Wnt3a for comparison. Calculated EC50 and maximum efficacy relative to recombinant
Wnt3a control were derived and are presented as the average ± SD.

| | | N-term | C-term | EC₅₀ | Maximal [symbol] |
|---|---|---|---|---|---|
| Name | Format | Paratope | Paratope | (nM) | (% Wnt3a [symbol] |
| Wnt3a | Recombinant Protein | NA | NA | 6 ± 3 | 100 [symbol] |
| CM0042 | Dia - Fc - Dia | 5019 | 2539 | 0.9 ± 0.8 | 33 ± 2 [symbol] |
| CM0011 | Dia - Fc - Dia | 5019 | 2539/2542 | 0.3 ± 0.1 | 63 ± 1 [symbol] |
| CM0126 | Dia - Fc - Dia | 5016 | 2539/2542 | 0.3 ± 0.2 | 52 ± 1 [symbol] |
| CM0107 | Dia-Fc-scFv | 5019 | 2539 | ND | ND [symbol] |
| CM0108 | Dia-Fc-scFv | 5019 | 2542 | ND | ND [symbol] |
| CM0109 | Dia-Fc-scFv | 5019 | 2539/2542 | ND | ND [symbol] |
| CT003 | Dia-Fc-scFv | 2539/2542 | 5016 | 0.4 ± 0.1 | 42 ± 1 [symbol] |
| CM0112 | scFv-Fc-Dia | 5019 | 2539/2542 | ND | ND [symbol] |
| CM0110 | scFv-Fc-scFv | 5019 | 2539/2542 | ND | ND [symbol] |
| CT001 | bslgG-dia | 5016 | 2539/2542 | 0.3 ± 0.1 | 57 ± 1 [symbol] |
| CM0299 | lgG-dia | 5016 | 2539 | 0.1 ± 0.1 | 14 ± 5 [symbol] |
| CM0300 | lgG-scFv | 5016 | 2539 | 0.3 ± 0.2 | 5 ± 2 [symbol] |
| CM0301 | lgG-scFv | 5016 | 2542 | 0.2 ± 0.2 | 1 ± 1 [symbol] |
| ANT1 | Dia-Fc-Fab | 5016 | 2539/2542 | 0.7 ± 0.5 | 50 ± 1 [symbol] |
| CH3 | Dia-CH3-Dia | 5019 | 2539 | ND | 22 ± 1 [symbol] |
| FAb-Dia | Fab-Dia | 5016 | 2540/2542 | 0.4 ± 0.2 | 42 ± 1 [symbol] |

[symbol]

indicates data missing or illegible when filed

TABLE 22
FZD2-LRP6 CM0072

| | |
|---|---|
| Knob construct | MNLLLILTFVAAAVAEFEVQLVESGGGLVQPGGSLRLSCAASGF [symbol] HW |
| | VRQAPGKGLEWVA [symbol] YADSVKGRFTISADTSKNTAYLQMNSLRA |
| | EDTAVYYCAR [symbol] DYWGQGTLVTVSSGGGGSDIQMTQSPSSLSASVGDR |
| | VTITCRASQ [symbol] VAWYQQKPGKAPKLLIY [symbol] GVPSRFSGSRSGTDFT |
| | LTISSLQPEDFATYYCQQ [symbol] TFGQGTKVEIKLEDKTHTKVEPKTSDKT |
| | HTCPPCPAPELLGGPSVFLFPPKPKDTLMISRTPEVTCVVVDVSHEDPEVKFNW |
| | YVDGVEVHNAKTKPREEQYNSTYRVVSVLTVLHQDWLNGKEYKCKVSNKA |
| | LPAPIEKTISKAKGQPREPMVFDLPPSREEMTKNQVSLWCMVKGFYPSDIAVE |
| | WESNGQPENNYKTTPPVLDSDGSFFLYSKLTVDKSRWQQGNVFSCSVMHEAL |
| | HNHYTQKSLSLSPGKSGSETPGTSESATPESGGGEVQLVESGGGLVQPGGSLR |
| | LSCAASGF [symbol] HWVRQAPGKGLEWVA [symbol] YADSVKGRFTISAD |
| | TSKNTAYLQMNSLRAEDTAVYYCAR [symbol] DYWGQGTLVTVSSGG |
| | GGSDIQMTQSPSSLSASVGDRVTITCRASQ [symbol] VAWYQQKPGKAPKLLIY [symbol] |
| | [symbol] GVPSRFSGSRSGTDFTLTISSLQPEDFATYYCQQ [symbol] TFGQGTKVEI |
| | K (SEQ ID NO: 1020) |
| Hole construct | MNLLLILTFVAAAVAEFEVQLVESGGGLVQPGGSLRLSCAASGF [symbol] HW |
| | VRQAPGKGLEWVA [symbol] ADSVKGRFTISADTSKNTAYLQMNSLRA |
| | EDTAVYYCAR [symbol] DYWGQGTLVTVSSGGGGSDIQMTQSPSSLSASVGDR |
| | VTITCRASQ [symbol] VAWYQQKPGKAPKLLIY [symbol] GVPSRFSGSRSGTDFT |
| | LTISSLQPEDFATYYCQQ [symbol] TFGQGTKVEIKLEDKTHTKVEPKSSDKT |
| | HNCPPCPAPELLGGPSVFLFPPKPKDTLMISRTPEVTCVVVDVSHEDPEVKFN |
| | WYVDGVEVHNAKTKPREEQYNSTYRVVSVLTVLHQDWLNGKEYKCKVSNK |
| | ALPAPIEKTISKAKGQPREPQVYTLPPIRELMTSNQVSLSCAVKGFYPSDIAVE |
| | WESNGQPENNYKTTPPVLDSDGSFFLVSKLTVDKSRWQQGNVFSCSVMHEAL |
| | HNHYTQKSLSLSPGKSGSETPGTSESATPESGGGEVQLVESGGGLVQPGGSLR |
| | LSCAASGF [symbol] HWVRQAPGKGLEWVA [symbol] YADSVKGRFTISAD |
| | TSKNTAYLQMNSLRAEDTAVYYCAR [symbol] DYWGQGTLVT |
| | VSSGGGGSDIQMTQSPSSLSASVGDRVTITCRASQ [symbol] VAWYQQKPGKAPK |
| | LLIY [symbol] GVPSRFSGSRSGTDFTLTISSLQPEDFATYYCQQ [symbol] TFGQ |
| | GTKVEIK (SEQ ID NO: 1021) |

FZD5-LRP6 CM0024

| | |
|---|---|
| Knob construct | MNLLLILTFVAAAVAEFEVQLVESGGGLVQPGGSLRLSCAASGF [symbol] HW |
| | VRQAPGKGLEWVA [symbol] YADSVKGRFTISADTSKNTAYLQMNSLRAE |
| | DTAVYYCAR [symbol] DYWGQGTLVTVSSGGGGSDIQMTQSPSSLSASVGDRVTI |
| | TCRASQ [symbol] VAWYQQKPGKAPKLLIY [symbol] GVPSRFSGSRSGTDFTLTIS |
| | SLQPEDFATYYCQQ [symbol] TFGQGTKVEIKLEDKTHTKVEPKTSDKTHTCPP |
| | CPAPELLGGPSVFLFPPKPKDTLMISRTPEVTCVVVDVSHEDPEVKFNWYVDG |
| | VEVHNAKTKPREEQYNSTYRVVSVLTVLHQDWLNGKEYKCKVSNKALPAPI |
| | EKTISKAKGQPREPMVFDLPPSREEMTKNQVSLWCMVKGFYPSDIAVEWESN |
| | GQPENNYKTTPPVLDSDGSFFLYSKLTVDKSRWQQGNVFSCSVMHEALHNH |
| | YTQKSLSLSPGKSGSETPGTSESATPESGGGEVQLVESGGGLVQPGGSLRLSC |
| | AASGF [symbol] HWVRQAPGKGLEWVA [symbol] YADSVKGRFTISADTS |
| | KNTAYLQMNSLRAEDTAVYYCAR [symbol] DYWGQGTLVTVSSGGGG |
| | SDIQMTQSPSSLSASVGDRVTITCRASQ [symbol] VAWYQQKPGKAPKLLIY [symbol] |
| | [symbol] GVPSRFSGSRSGTDFTLTISSLQPEDFATYYCQQ [symbol] TFGQGTKVEIK |
| | (SEQ ID NO: 1022) |
| Hole construct | MNLLLILTFVAAAVAEFEVQLVESGGGLVQPGGSLRLSCAASGF [symbol] HW |
| | VRQAPGKGLEWVA [symbol] YADSVKGRFTISADTSKNTAYLQMNSLRAE |
| | DTAVYYCAR [symbol] DYWGQGTLVTVSSGGGGSDIQMTQSPSSLSASVGDRVTI |
| | TCRASQ [symbol] VAWYQQKPGKAPKLLIY [symbol] GVPSRFSGSRSGTDFTLTIS |
| | SLQPEDFATYYCQQ [symbol] TFGQGTKVEIKLEDKTHTKVEPKSSDKTHNCPP |
| | CPAPELLGGPSVFLFPPKPKDTLMISRTPEVTCVVVDVSHEDPEVKFNWYVDG |
| | VEVHNAKTKPREEQYNSTYRVVSVLTVLHQDWLNGKEYKCKVSNKALPAPI |
| | EKTISKAKGQPREPQVYTLPPIRELMTSNQVSLSCAVKGFYPSDIAVEWESNG |
| | QPENNYKTTPPVLDSDGSFFLVSKLTVDKSRWQQGNVFSCSVMHEALHNHY |
| | TQKSLSLSPGKSGSETPGTSESATPESGGGEVQLVESGGGLVQPGGSLRLSCA |
| | ASGF [symbol] HWVRQAPGKGLEWVA [symbol] YADSVKGRFTISADTSKN |
| | TAYLQMNSLRAEDTAVYYCAR [symbol] DYWGQGTLVTVSSGG |
| | GGSDIQMTQSPSSLSASVGDRVTITCRASQ [symbol] VAWYQQKPGKAPKLLIY [symbol] |
| | [symbol] GVPSRFSGSRSGTDFTLTISSLQPEDFATYYCQQ [symbol] TFGQGTKVEI |
| | K (SEQ ID NO: 1023) |

FZD7-LRP6 CM0172

| | |
|---|---|
| Knob construct | MNLLLILTFVAAAVAEFEVQLVESGGGLVQPGGSLRLSCAASGF [symbol] HW |
| | VRQAPGKGLEWVA [symbol] YADSVKGRFTISADTSKNTAYLQMNSLRA |
| | EDTAVYYCAR [symbol] DYWGQGTLVTVSSGGGGSDIQMTQSPSSLSASVGDRV |
| | TITCRASQ [symbol] VAWYQQKPGKAPKLLIY [symbol] GVPSRFSGSRSGTDFTLT |
| | ISSLQPEDFATYYCQQPGSWYFPPITFGQGTKVEIKLEDKTHTKVEPKTSDKT |
| | HTCPPCPAPELLGGPSVFLFPPKPKDTLMISRTPEVTCVVVDVSHEDPEVKFN |
| | WYVDGVEVHNAKTKPREEQYNSTYRVVSVLTVLHQDWLNGKEYKCKVSNK |
| | ALPAPIEKTISKAKGQPREPMVFDLPPSREEMTKNQVSLWCMVKGFYPSDIAV |
| | EWESNGQPENNYKTTPPVLDSDGSFFLYSKLTVDKSRWQQGNVFSCSVMHE |
| | ALHNHYTQKSLSLSPGKSGSETPGTSESATPESGGGEVQLVESGGGLVQPGGS |
| | LRLSCAASGF [symbol] HWVRQAPGKGLEWVA [symbol] YADSVKGRFTIS |
| | ADTSKNTAYLQMNSLRAEDTAVYYCAR [symbol] DYWGQGTLVTVSS |
| | GGGGSDIQMTQSPSSLSASVGDRVTITCRASQ [symbol] VAWYQQKPGKAPKLLI |
| | Y [symbol] GVPSRFSGSRSGTDFTLTISSLQPEDFATYYCQQ [symbol] TFGQGTK |
| | VEIK (SEQ ID NO: 1024) |
| Hole construct | MNLLLILTFVAAAVAEFEVQLVESGGGLVQPGGSLRLSCAASGF [symbol] HW |
| | VRQAPGKGLEWVA [symbol] YADSVKGRFTISADTSKNTAYLQMNSLRA |
| | EDTAVYYCAR [symbol] DYWGQGTLVTVSSGGGGSDIQMTQSPSSLSASVGDRV |
| | TITCRASQ [symbol] VAWYQQKPGKAPKLLIY [symbol] GVPSRFSGSRSGTDFTLT |
| | ISSLQPEDFATYYCQQ [symbol] TFGQGTKVEIKLEDKTHTKVEPKSSDKTH |
| | NCPPCPAPELLGGPSVFLFPPKPKDTLMISRTPEVTCVVVDVSHEDPEVKFNW |
| | YVDGVEVHNAKTKPREEQYNSTYRVVSVLTVLHQDWLNGKEYKCKVSNKA |
| | LPAPIEKTISKAKGQPREPQVYTLPPIRELMTSNQVSLSCAVKGFYPSDIAVEW |
| | ESNGQPENNYKTTPPVLDSDGSFFLVSKLTVDKSRWQQGNVFSCSVMHEALH |
| | NHYTQKSLSLSPGKSGSETPGTSESATPESGGGEVQLVESGGGLVQPGGSLRL |
| | SCAASGF [symbol] HWVRQAPGKGLEWVA [symbol] YADSVKGRFTISADT |
| | SKNTAYLQMNSLRAEDTAVYYCAR [symbol] DYWGQGTLVTVSS |
| | GGGGSDIQMTQSPSSLSASVGDRVTITCRASQ [symbol] VAWYQQKPGKAPKLLI |
| | Y [symbol] GVPSRFSGSRSGTDFTLTISSLQPEDFATYYCQQ [symbol] TFGQGT |
| | KVEIK (SEQ ID NO: 1025) |

PanFZD-LRP6 CM0011

| | |
|---|---|
| Knob construct | MNLLLILTFVAAAVAEFEVQLVESGGGLVQPGGSLRLSCAASGF [symbol] HW |
| | VRQAPGKGLEWVA [symbol] YADSVKGRFTISADTSKNTAYLQMNSLRA |
| | EDTAVYYCAR [symbol] DYWGQGTLVTVSSGGGGSDIQMTQSPSSLSASV |
| | GDRVTITCRASQ [symbol] VAWYQQKPGKAPKLLIY [symbol] GVPSRFSGSRSGT |
| | DFTLTISSLQPEDFATYYCQQ [symbol] TFGQGTKVEIKLEDKTHTKVEPKTSDK |
| | THTCPPCPAPELLGGPSVFLFPPKPKDTLMISRTPEVTCVVVDVSHEDPEVKFN |
| | WYVDGVEVHNAKTKPREEQYNSTYRVVSVLTVLHQDWLNGKEYKCKVSNK |
| | ALPAPIEKTISKAKGQPREPMVFDLPPSREEMTKNQVSLWCMVKGFYPSDIAV |
| | EWESNGQPENNYKTTPPVLDSDGSFFLYSKLTVDKSRWQQGNVFSCSVMHE |
| | ALHNHYTQKSLSLSPGKSGSETPGTSESATPESGGGEVQLVESGGGLVQPGGS |
| | LRLSCAASGFNISYSSIHWVRQAPGKGLEWVA [symbol] YADSVKGRFTIS |
| | ADTSKNTAYLQMNSLRAEDTAVYYCAR [symbol] DYWGQGTLVTVSS |
| | GGGGSDIQMTQSPSSLSASVGDRVTITCRASQ [symbol] VAWYQQKPGKAPKLLI |
| | Y [symbol] GVPSRFSGSRSGTDFTLTISSLQPEDFATYYCQQ [symbol] TFGQGTK |
| | VEIK (SEQ ID NO: 1026) |
| Hole construct | MNLLLILTFVAAAVAEFEVQLVESGGGLVQPGGSLRLSCAASGF [symbol] HW |
| | VRQAPGKGLEWVA [symbol] YADSVKGRFTISADTSKNTAYLQMNSLRA |
| | EDTAVYYCAR [symbol] DYWGQGTLVTVSSGGGGSDIQMTQSPSSLSASV |
| | GDRVTITCRASQ [symbol] VAWYQQKPGKAPKLLIY [symbol] GVPSRFSGSRSGT |
| | DFTLTISSLQPEDFATYYCQQ [symbol] TFGQGTKVEIKLEDKTHTKVEPKSSDKT |
| | HNCPPCPAPELLGGPSVFLFPPKPKDTLMISRTPEVTCVVVDVSHEDPEVKFN |
| | WYVDGVEVHNAKTKPREEQYNSTYRVVSVLTVLHQDWLNGKEYKCKVSNK |
| | ALPAPIEKTISKAKGQPREPQVYTLPPIRELMTSNQVSLSCAVKGFYPSDIAVE |
| | WESNGQPENNYKTTPPVLDSDGSFFLVSKLTVDKSRWQQGNVFSCSVMHEA |
| | LHNHYTQKSLSLSPGKSGSETPGTSESATPESGGGEVQLVESGGGLVQPGGSL |
| | RLSCAASGF [symbol] HWVRQAPGKGLEWVA [symbol] YADSVKGRFTISA |
| | DTSKNTAYLQMNSLRAEDTAVYYCAR [symbol] DYWGQGTLVT |
| | VSSGGGGSDIQMTQSPSSLSASVGDRVTITCRASQ [symbol] VAWYQQKPGKAPK |
| | LLIY [symbol] GVPSRFSGSRSGTDFTLTISSLQPEDFATYYCQQ [symbol] TFGQ |
| | GTKVEIK (SEQ ID NO: 1027) |

FZD4-LRP6 CM0016

| | |
|---|---|
| Knob construct | MNLLLILTFVAAAVAEFEVQLVESGGGLVQPGGSLRLSCAASGF [symbol] HW |
| | VRQAPGKGLEWVA [symbol] YADSVKGRFTISADTSKNTAYLQMNSLRA |
| | EDTAVYYCAR [symbol] DYWGQGTLVTVSSGGGGSDIQMTQSPSSLSASVG |
| | DRVTITCRASQ [symbol] VAWYQQKPGKAPKLLIY [symbol] GVPSRFSGSRSGTD |
| | FTLTISSLQPEDFATYYCQQ [symbol] TFGQGTKVEIKLEDKTHTKVEPKSSDK |
| | THNCPPCPAPELLGGPSVFLFPPKPKDTLMISRTPEVTCVVVDVSHEDPEVKFN |
| | WYVDGVEVHNAKTKPREEQYNSTYRVVSVLTVLHQDWLNGKEYKCKVSNK |
| | ALPAPIEKTISKAKGQPREPQVYTLPPIRELMTSNQVSLSCAVKGFYPSDIAVE |
| | WESNGQPENNYKTTPPVLDSDGSFFLVSKLTVDKSRWQQGNVFSCSVMHEA |
| | LHNHYTQKSLSLSPGKSGSETPGTSESATPESGGGEVQLVESGGGLVQPGGSL |
| | RLSCAASGF [symbol] HWVRQAPGKGLEWVA [symbol] YADSVKGRFTISA |
| | DTSKNTAYLQMNSLRAEDTAVYYCAR [symbol] DYWGQGTLVT |
| | VSSGGGGSDIQMTQSPSSLSASVGDRVTITCRASQ [symbol] VAWYQQKPGKAPK |
| | LLIY [symbol] GVPSRFSGSRSGTDFTLTISSLQPEDFATYYCQQ [symbol] TFGQ |
| | GTKVEIK (SEQ ID NO: 1028) |
| Hole construct | MNLLLILTFVAAAVAEFEVQLVESGGGLVQPGGSLRLSCAASGFNISYYYIHW |
| | VRQAPGKGLEWVA [symbol] YADSVKGRFTISADTSKNTAYLQMNSLRA |
| | EDTAVYYCAR [symbol] DYWGQGTLVTVSSGGGGSDIQMTQSPSSLSASVG |
| | DRVTITCRASQ [symbol] VAWYQQKPGKAPKLLIY [symbol] GVPSRFSGSRSGTD |
| | FTLTISSLQPEDFATYYCQQ [symbol] TFGQGTKVEIKLEDKTHTKVEPKTSDK |
| | THTCPPCPAPELLGGPSVFLFPPKPKDTLMISRTPEVTCVVVDVSHEDPEVKFN |
| | WYVDGVEVHNAKTKPREEQYNSTYRVVSVLTVLHQDWLNGKEYKCKVSNK |
| | ALPAPIEKTISKAKGQPREPMVFDLPPSREEMTKNQVSLWCMVKGFYPSDIAV |
| | EWESNGQPENNYKTTPPVLDSDGSFFLYSKLTVDKSRWQQGNVFSCSVMHE |
| | ALHNHYTQKSLSLSPGKSGSETPGTSESATPESGGGEVQLVESGGGLVQPGGS |
| | LRLSCAASGF [symbol] HWVRQAPGKGLEWVA [symbol] YADSVKGRFTIS |
| | ADTSKNTAYLQMNSLRAEDTAVYYCAR [symbol] DYWGQGTLVTVSS |
| | GGGGSDIQMTQSPSSLSASVGDRVTITCRASQ [symbol] VAWYQQKPGKAPKLLI |
| | Y [symbol] GVPSRFSGSRSGTDFTLTISSLQPEDFATYYCQQ [symbol] TFGQGTK |
| | VEIK (SEQ ID NO: 1029) |

TABLE 23
Nucleic acid sequences encoding the Diabody-
Fc-Fab and IgG-Diabody polypeptide sequences
of the “heavy chain” hole construct, “heavy
chain” knob construct and the “light chain”
construct of the FZD4 Agonists, ANT39 and
ANT39i having Fc domain amino acid mutations
DANG, LALAPS, LALAPS and Merchant or LALAPS
and Merchant S-S. 5’ leader signal peptides
are underlined. Stop codons are in italics.
Mature sequences do not include the
5′ leader peptide.

ANT39i HC hole DANG nucleotide sequence
ATGGGATGGTCATGTATCATCCTTTTTCTGGTAGC
AACTGCAACTGGAGTACATAGCGAAGTTCAGCTCG
TGGAGTCCGGTGGAGGCCTGGTGCAACCTGGAGGC
TCTCTGCGGCTCAGTTGTGCTGCTAGTGGATTCAC
ACTGAGCTCATACTCTATGCATTGGGTCAGACAAG
CTCCTGGCAAGGGGCTGGAATGGGTAGCCTACATT
AGCTCATATGACAGTATCACTGACTATGCGGATTC
TGTGAAAGGCAGATTCACCATCTCCGCTGATACCT
CTAAGAACACAGCCTACTTGCAAATGAATTCTTTG
AGGGCTGAGGACACCGCCGTCTATTACTGCGCCCG
CCCTGCCGTCGGCCACATGGCCTTTGATTATTGGG
GCCAGGGCACCCTGGTGACAGTTAGTTCCGCTAGC
ACCAAGGGCCCATCGGTCTTCCCCCTGGCACCCTC
CTCCAAGAGCACCTCTGGGGGCACAGCGGCCCTGG
GCTGCCTGGTCAAGGACTACTTCCCCGAACCGGTG
ACGGTGTCGTGGAACTCAGGCGCCCTGACCAGCGG
CGTGCACACCTTCCCGGCCGTCCTACAGTCCTCAG
GACTCTACTCCCTCAGCAGCGTGGTGACCGTGCCC
TCCAGCAGCTTGGGCACCCAGACCTACATCTGCAA
CGTGAATCACAAGCCCAGCAACACCAAGGTGGACA
AGAAGGTTGAGCCCAAATCTTGTGACAAAACTCAC
ACATGCCCACCGTGCCCAGCACCTGAACTCCTGGG
GGGACCGTCAGTCTTCCTCTTCCCCCCAAAACCCA
AGGACACCCTCATGATCTCCCGGACCCCTGAGGTC
ACATGCGTGGTGGTGGCCGTGAGCCACGAAGACCC
TGAGGTCAAGTTCAACTGGTACGTGGACGGCGTGG
AGGTGCATAATGCCAAGACAAAGCCGCGGGAGGAG
CAGTACGGCAGCACGTACCGTGTGGTCAGCGTCCT
CACCGTCCTGCACCAGGACTGGCTGAATGGCAAGG
AGTACAAGTGCAAGGTCTCCAACAAAGCCCTCCCA
GCCCCCATCGAGAAAACCATCTCCAAAGCCAAAGG
GCAGCCCCGAGAACCACAGGTGTACACCCTGCCCC
CAATCCGGGAGCTGATGACCTCCAACCAGGTCAGC
CTGAGCTGCGCCGTCAAAGGCTTCTATCCCAGCGA
CATCGCCGTGGAGTGGGAGAGCAATGGGCAGCCGG
AGAACAACTACAAGACCACGCCTCCCGTGCTGGAC
TCCGACGGCTCCTTCTTCCTCGTGAGCAAGCTCAC
CGTGGACAAGAGCAGGTGGCAGCAGGGGAACGTCT
TCTCATGCTCCGTGATGCATGAGGCTCTGCACAAC
CACTACACGCAGAAGAGCCTCTCCCTGTCTCCGGG
CAAAGGTGGAGGCAGTGGTGGAGGATCTGGCGGTG
GCAGTGGCGGTGGTAGCGGGTCCACGGGGGAGGTC
CAATTGGTGGAATCTGGTGGCGGTTTAGTCCAACC
GGGTGGCTCCCTCCGGCTGTCCTGCGCTGCTAGTG
GCTTCGATTTTAGCTCCTCTTCTATCCACTGGGTC
AGACAGGCTCCTGGCAAGGGTCTCGAATGGGTGGC
CTCTATCTCCTCTTCCTACGGATATACCTATTATG
CTGACTCTGTTAAAGGCCGCTTTACCATCTCTGCC
GATACCAGCAAGAACACAGCTTATCTGCAAATGAA
TTCTCTCCGCGCCGAGGACACTGCCGTCTACTACT
GCGCACGTTCTTGGGCCATGGACTACTGGGGCCAG
GGCACCCTGGTGACAGTCTCCTCTGGAGGTGGCGG
CTCCGACATCCAGATGACTCAGAGCCCAAGCTCCT
TGTCCGCATCTGTTGGCGATCGAGTGACCATTACC
TGCCGGGCTAGCCAGTCTGTATCTTCTGCCGTGGC
CTGGTACCAGCAAAAGCCAGGCAAGGCTCCCAAAC
TGCTGATTTATAGTGCTTCTGATCTGTACTCCGGC
GTTCCATCTCGATTTAGCGGGTCCCGCTCCGGAAC
CGATTTCACACTCACAATTTCCAGTCTCCAGCCTG
AGGACTTCGCCACATACTACTGCCAACAATACGCG
GGTGCCGGGCTGATCACCTTTGGACAAGGGACAAA
GGTGGAGATCAAAT
AATAG (SEQ ID NO: 1030)
ANT39i HC hole LALAPS nucleotide sequence
ATGGGATGGTCATGTATCATCCTTTTTCTGGTAGC
AACTGCAACTGGAGTACATAGCGAAGTTCAGCTCG
TGGAGTCCGGTGGAGGCCTGGTGCAACCTGGAGGC
TCTCTGCGGCTCAGTTGTGCTGCTAGTGGATTCAC
ACTGAGCTCATACTCTATGCATTGGGTCAGACAAG
CTCCTGGCAAGGGGCTGGAATGGGTAGCCTACATT
AGCTCATATGACAGTATCACTGACTATGCGGATTC
TGTGAAAGGCAGATTCACCATCTCCGCTGATACCT
CTAAGAACACAGCCTACTTGCAAATGAATTCTTTG
AGGGCTGAGGACACCGCCGTCTATTACTGCGCCCG
CCCTGCCGTCGGCCACATGGCCTTTGATTATTGGG
GCCAGGGCACCCTGGTGACAGTTAGTTCCGCTAGC
ACCAAGGGCCCATCGGTCTTCCCCCTGGCACCCTC
CTCCAAGAGCACCTCTGGGGGCACAGCGGCCCTGG
GCTGCCTGGTCAAGGACTACTTCCCCGAACCGGTG
ACGGTGTCGTGGAACTCAGGCGCCCTGACCAGCGG
CGTGCACACCTTCCCGGCCGTCCTACAGTCCTCAG
GACTCTACTCCCTCAGCAGCGTGGTGACCGTGCCC
TCCAGCAGCTTGGGCACCCAGACCTACATCTGCAA
CGTGAATCACAAGCCCAGCAACACCAAGGTGGACA
AGAAGGTTGAGCCCAAATCTTGTGACAAAACTCAC
ACATGCCCACCGTGCCCAGCACCTGAAGCCGCCGG
GGGACCGTCAGTCTTCCTCTTCCCCCCAAAACCCA
AGGACACCCTCATGATCTCCCGGACCCCTGAGGTC
ACATGCGTGGTGGTGGACGTGAGCCACGAAGACCC
TGAGGTCAAGTTCAACTGGTACGTGGACGGCGTGG
AGGTGCATAATGCCAAGACAAAGCCGCGGGAGGAG
CAGTACAACAGCACGTACCGTGTGGTCAGCGTCCT
CACCGTCCTGCACCAGGACTGGCTGAATGGCAAGG
AGTACAAGTGCAAGGTCTCCAACAAAGCCCTCCCA
GCCTCCATCGAGAAAACCATCTCCAAAGCCAAAGG
GCAGCCCCGAGAACCACAGGTGTACACCCTGCCCC
CAATCCGGGAGCTGATGACCTCCAACCAGGTCAGC
CTGAGCTGCGCCGTCAAAGGCTTCTATCCCAGCGA
CATCGCCGTGGAGTGGGAGAGCAATGGGCAGCCGG
AGAACAACTACAAGACCACGCCTCCCGTGCTGGAC
TCCGACGGCTCCTTCTTCCTCGTGAGCAAGCTCAC
CGTGGACAAGAGCAGGTGGCAGCAGGGGAACGTCT
TCTCATGCTCCGTGATGCATGAGGCTCTGCACAAC
CACTACACGCAGAAGAGCCTCTCCCTGTCTCCGGG
CAAAGGTGGAGGCAGTGGTGGAGGATCTGGCGGTG
GCAGTGGCGGTGGTAGCGGGTCCACGGGGGAGGTC
CAATTGGTGGAATCTGGTGGCGGTTTAGTCCAACC
GGGTGGCTCCCTCCGGCTGTCCTGCGCTGCTAGTG
GCTTCGATTTTAGCTCCTCTTCTATCCACTGGGTC
AGACAGGCTCCTGGCAAGGGTCTCGAATGGGTGGC
CTCTATCTCCTCTTCCTACGGATATACCTATTATG
CTGACTCTGTTAAAGGCCGCTTTACCATCTCTGCC
GATACCAGCAAGAACACAGCTTATCTGCAAATGAA
TTCTCTCCGCGCCGAGGACACTGCCGTCTACTACT
GCGCACGTTCTTGGGCCATGGACTACTGGGGCCAG
GGCACCCTGGTGACAGTCTCCTCTGGAGGTGGCGG
CTCCGACATCCAGATGACTCAGAGCCCAAGCTCCT
TGTCCGCATCTGTTGGCGATCGAGTGACCATTACC
TGCCGGGCTAGCCAGTCTGTATCTTCTGCCGTGGC
CTGGTACCAGCAAAAGCCAGGCAAGGCTCCCAAAC
TGCTGATTTATAGTGCTTCTGATCTGTACTCCGGC
GTTCCATCTCGATTTAGCGGGTCCCGCTCCGGAAC
CGATTTCACACTCACAATTTCCAGTCTCCAGCCTG
AGGACTTCGCCACATACTACTGCCAACAATACGCG
GGTGCCGGGCTGATCACCTTTGGACAAGGGACAAA
GGTGGAGATCAAAT
AATAG (SEQ ID NO: 1031)
ANT39i HC hole LAL APS Merchant
nucleotide sequence
ATGGGATGGTCATGTATCATCCTTTTTCTGGTAGC
AACTGCAACTGGAGTACATAGCGAAGTTCAGCTCG
TGGAGTCCGGTGGAGGCCTGGTGCAACCTGGAGGC
TCTCTGCGGCTCAGTTGTGCTGCTAGTGGATTCAC
ACTGAGCTCATACTCTATGCATTGGGTCAGACAAG
CTCCTGGCAAGGGGCTGGAATGGGTAGCCTACATT
AGCTCATATGACAGTATCACTGACTATGCGGATTC
TGTGAAAGGCAGATTCACCATCTCCGCTGATACCT
CTAAGAACACAGCCTACTTGCAAATGAATTCTTTG
AGGGCTGAGGACACCGCCGTCTATTACTGCGCCCG
CCCTGCCGTCGGCCACATGGCCTTTGATTATTGGG
GCCAGGGCACCCTGGTGACAGTTAGTTCCGCTAGC
ACCAAGGGCCCATCGGTCTTCCCCCTGGCACCCTC
CTCCAAGAGCACCTCTGGGGGCACAGCGGCCCTGG
GCTGCCTGGTCAAGGACTACTTCCCCGAACCGGTG
ACGGTGTCGTGGAACTCAGGCGCCCTGACCAGCGG
CGTGCACACCTTCCCGGCCGTCCTACAGTCCTCAG
GACTCTACTCCCTCAGCAGCGTGGTGACCGTGCCC
TCCAGCAGCTTGGGCACCCAGACCTACATCTGCAA
CGTGAATCACAAGCCCAGCAACACCAAGGTGGACA
AGAAGGTTGAGCCCAAATCTTGTGACAAAACTCAC
ACATGCCCACCGTGCCCAGCACCTGAAGCCGCCGG
GGGACCGTCAGTCTTCCTCTTCCCCCCAAAACCCA
AGGACACCCTCATGATCTCCCGGACCCCTGAGGTC
ACATGCGTGGTGGTGGACGTGAGCCACGAAGACCC
TGAGGTCAAGTTCAACTGGTACGTGGACGGCGTGG
AGGTGCATAATGCCAAGACAAAGCCGCGGGAGGAG
CAGTACAACAGCACGTACCGTGTGGTCAGCGTCCT
CACCGTCCTGCACCAGGACTGGCTGAATGGCAAGG
AGTACAAGTGCAAGGTCTCCAACAAAGCCCTCCCA
GCCTCCATCGAGAAAACCATCTCCAAAGCCAAAGG
GCAGCCCCGAGAACCACAGGTGTACACCCTGCCCC
CATCCCGGGAGGAGATGACCAAGAACCAGGTCAGC
CTGAGCTGCGCCGTCAAAGGCTTCTATCCCAGCGA
CATCGCCGTGGAGTGGGAGAGCAATGGGCAGCCGG
AGAACAACTACAAGACCACGCCTCCCGTGCTGGAC
TCCGACGGCTCCTTCTTCCTCGTGAGCAAGCTCAC
CGTGGACAAGAGCAGGTGGCAGCAGGGGAACGTCT
TCTCATGCTCCGTGATGCATGAGGCTCTGCACAAC
CACTACACGCAGAAGAGCCTCTCCCTGTCTCCGGG
CAAAGGTGGAGGCAGTGGTGGAGGATCTGGCGGTG
GCAGTGGCGGTGGTAGCGGGTCCACGGGGGAGGTC
CAATTGGTGGAATCTGGTGGCGGTTTAGTCCAACC
GGGTGGCTCCCTCCGGCTGTCCTGCGCTGCTAGTG
GCTTCGATTTTAGCTCCTCTTCTATCCACTGGGTC
AGACAGGCTCCTGGCAAGGGTCTCGAATGGGTGGC
CTCTATCTCCTCTTCCTACGGATATACCTATTATG
CTGACTCTGTTAAAGGCCGCTTTACCATCTCTGCC
GATACCAGCAAGAACACAGCTTATCTGCAAATGAA
TTCTCTCCGCGCCGAGGACACTGCCGTCTACTACT
GCGCACGTTCTTGGGCCATGGACTACTGGGGCCAG
GGCACCCTGGTGACAGTCTCCTCTGGAGGTGGCGG
CTCCGACATCCAGATGACTCAGAGCCCAAGCTCCT
TGTCCGCATCTGTTGGCGATCGAGTGACCATTACC
TGCCGGGCTAGCCAGTCTGTATCTTCTGCCGTGGC
CTGGTACCAGCAAAAGCCAGGCAAGGCTCCCAAAC
TGCTGATTTATAGTGCTTCTGATCTGTACTCCGGC
GTTCCATCTCGATTTAGCGGGTCCCGCTCCGGAAC
CGATTTCACACTCACAATTTCCAGTCTCCAGCCTG
AGGACTTCGCCACATACTACTGCCAACAATACGCG
GGTGCCGGGCTGATCACCTTTGGACAAGGGACAAA
GGTGGAGATCAAA
TAATAG (SEQ ID NO: 1032)
ANT39i HC hole LALAPS Merchant S-S
nucleotide sequence
ATGGGATGGTCATGTATCATCCTTTTTCTGGTAGC
AACTGCAACTGGAGTACATAGCGAAGTTCAGCTCG
TGGAGTCCGGTGGAGGCCTGGTGCAACCTGGAGGC
TCTCTGCGGCTCAGTTGTGCTGCTAGTGGATTCAC
ACTGAGCTCATACTCTATGCATTGGGTCAGACAAG
CTCCTGGCAAGGGGCTGGAATGGGTAGCCTACATT
AGCTCATATGACAGTATCACTGACTATGCGGATTC
TGTGAAAGGCAGATTCACCATCTCCGCTGATACCT
CTAAGAACACAGCCTACTTGCAAATGAATTCTTTG
AGGGCTGAGGACACCGCCGTCTATTACTGCGCCCG
CCCTGCCGTCGGCCACATGGCCTTTGATTATTGGG
GCCAGGGCACCCTGGTGACAGTTAGTTCCGCTAGC
ACCAAGGGCCCATCGGTCTTCCCCCTGGCACCCTC
CTCCAAGAGCACCTCTGGGGGCACAGCGGCCCTGG
GCTGCCTGGTCAAGGACTACTTCCCCGAACCGGTG
ACGGTGTCGTGGAACTCAGGCGCCCTGACCAGCGG
CGTGCACACCTTCCCGGCCGTCCTACAGTCCTCAG
GACTCTACTCCCTCAGCAGCGTGGTGACCGTGCCC
TCCAGCAGCTTGGGCACCCAGACCTACATCTGCAA
CGTGAATCACAAGCCCAGCAACACCAAGGTGGACA
AGAAGGTTGAGCCCAAATCTTGTGACAAAACTCAC
ACATGCCCACCGTGCCCAGCACCTGAAGCCGCCGG
GGGACCGTCAGTCTTCCTCTTCCCCCCAAAACCCA
AGGACACCCTCATGATCTCCCGGACCCCTGAGGTC
ACATGCGTGGTGGTGGACGTGAGCCACGAAGACCC
TGAGGTCAAGTTCAACTGGTACGTGGACGGCGTGG
AGGTGCATAATGCCAAGACAAAGCCGCGGGAGGAG
CAGTACAACAGCACGTACCGTGTGGTCAGCGTCCT
CACCGTCCTGCACCAGGACTGGCTGAATGGCAAGG
AGTACAAGTGCAAGGTCTCCAACAAAGCCCTCCCA
GCCTCCATCGAGAAAACCATCTCCAAAGCCAAAGG
GCAGCCCCGAGAACCACAGGTGTGCACCCTGCCCC
CATCCCGGGAGGAGATGACCAAGAACCAGGTCAGC
CTGAGCTGCGCCGTCAAAGGCTTCTATCCCAGCGA
CATCGCCGTGGAGTGGGAGAGCAATGGGCAGCCGG
AGAACAACTACAAGACCACGCCTCCCGTGCTGGAC
TCCGACGGCTCCTTCTTCCTCGTGAGCAAGCTCAC
CGTGGACAAGAGCAGGTGGCAGCAGGGGAACGTCT
TCTCATGCTCCGTGATGCATGAGGCTCTGCACAAC
CACTACACGCAGAAGAGCCTCTCCCTGTCTCCGGG
CAAAGGTGGAGGCAGTGGTGGAGGATCTGGCGGTG
GCAGTGGCGGTGGTAGCGGGTCCACGGGGGAGGTC
CAATTGGTGGAATCTGGTGGCGGTTTAGTCCAACC
GGGTGGCTCCCTCCGGCTGTCCTGCGCTGCTAGTG
GCTTCGATTTTAGCTCCTCTTCTATCCACTGGGTC
AGACAGGCTCCTGGCAAGGGTCTCGAATGGGTGGC
CTCTATCTCCTCTTCCTACGGATATACCTATTATG
CTGACTCTGTTAAAGGCCGCTTTACCATCTCTGCC
GATACCAGCAAGAACACAGCTTATCTGCAAATGAA
TTCTCTCCGCGCCGAGGACACTGCCGTCTACTACT
GCGCACGTTCTTGGGCCATGGACTACTGGGGCCAG
GGCACCCTGGTGACAGTCTCCTCTGGAGGTGGCGG
CTCCGACATCCAGATGACTCAGAGCCCAAGCTCCT
TGTCCGCATCTGTTGGCGATCGAGTGACCATTACC
TGCCGGGCTAGCCAGTCTGTATCTTCTGCCGTGGC
CTGGTACCAGCAAAAGCCAGGCAAGGCTCCCAAAC
TGCTGATTTATAGTGCTTCTGATCTGTACTCCGGC
GTTCCATCTCGATTTAGCGGGTCCCGCTCCGGAAC
CGATTTCACACTCACAATTTCCAGTCTCCAGCCTG
AGGACTTCGCCACATACTACTGCCAACAATACGCG
GGTGCCGGGCTGATCACCTTTGGACAAGGGACAAA
GGTGGAGATCAAA
TAATAG (SEQ ID NO: 1033)
Mature ANT39i HC hole DANG
nucleotide sequence
GAAGTTCAGCTCGTGGAGTCCGGTGGAGGCCTGGT
GCAACCTGGAGGCTCTCTGCGGCTCAGTTGTGCTG
CTAGTGGATTCACACTGAGCTCATACTCTATGCAT
TGGGTCAGACAAGCTCCTGGCAAGGGGCTGGAATG
GGTAGCCTACATTAGCTCATATGACAGTATCACTG
ACTATGCGGATTCTGTGAAAGGCAGATTCACCATC
TCCGCTGATACCTCTAAGAACACAGCCTACTTGCA
AATGAATTCTTTGAGGGCTGAGGACACCGCCGTCT
ATTACTGCGCCCGCCCTGCCGTCGGCCACATGGCC
TTTGATTATTGGGGCCAGGGCACCCTGGTGACAGT
TAGTTCCGCTAGCACCAAGGGCCCATCGGTCTTCC
CCCTGGCACCCTCCTCCAAGAGCACCTCTGGGGGC
ACAGCGGCCCTGGGCTGCCTGGTCAAGGACTACTT
CCCCGAACCGGTGACGGTGTCGTGGAACTCAGGCG
CCCTGACCAGCGGCGTGCACACCTTCCCGGCCGTC
CTACAGTCCTCAGGACTCTACTCCCTCAGCAGCGT
GGTGACCGTGCCCTCCAGCAGCTTGGGCACCCAGA
CCTACATCTGCAACGTGAATCACAAGCCCAGCAAC
ACCAAGGTGGACAAGAAGGTTGAGCCCAAATCTTG
TGACAAAACTCACACATGCCCACCGTGCCCAGCAC
CTGAACTCCTGGGGGGACCGTCAGTCTTCCTCTTC
CCCCCAAAACCCAAGGACACCCTCATGATCTCCCG
GACCCCTGAGGTCACATGCGTGGTGGTGGCCGTGA
GCCACGAAGACCCTGAGGTCAAGTTCAACTGGTAC
GTGGACGGCGTGGAGGTGCATAATGCCAAGACAAA
GCCGCGGGAGGAGCAGTACGGCAGCACGTACCGTG
TGGTCAGCGTCCTCACCGTCCTGCACCAGGACTGG
CTGAATGGCAAGGAGTACAAGTGCAAGGTCTCCAA
CAAAGCCCTCCCAGCCCCCATCGAGAAAACCATCT
CCAAAGCCAAAGGGCAGCCCCGAGAACCACAGGTG
TACACCCTGCCCCCAATCCGGGAGCTGATGACCTC
CAACCAGGTCAGCCTGAGCTGCGCCGTCAAAGGCT
TCTATCCCAGCGACATCGCCGTGGAGTGGGAGAGC
AATGGGCAGCCGGAGAACAACTACAAGACCACGCC
TCCCGTGCTGGACTCCGACGGCTCCTTCTTCCTCG
TGAGCAAGCTCACCGTGGACAAGAGCAGGTGGCAG
CAGGGGAACGTCTTCTCATGCTCCGTGATGCATGA
GGCTCTGCACAACCACTACACGCAGAAGAGCCTCT
CCCTGTCTCCGGGCAAAGGTGGAGGCAGTGGTGGA
GGATCTGGCGGTGGCAGTGGCGGTGGTAGCGGGTC
CACGGGGGAGGTCCAATTGGTGGAATCTGGTGGCG
GTTTAGTCCAACCGGGTGGCTCCCTCCGGCTGTCC
TGCGCTGCTAGTGGCTTCGATTTTAGCTCCTCTTC
TATCCACTGGGTCAGACAGGCTCCTGGCAAGGGTC
TCGAATGGGTGGCCTCTATCTCCTCTTCCTACGGA
TATACCTATTATGCTGACTCTGTTAAAGGCCGCTT
TACCATCTCTGCCGATACCAGCAAGAACACAGCTT
ATCTGCAAATGAATTCTCTCCGCGCCGAGGACACT
GCCGTCTACTACTGCGCACGTTCTTGGGCCATGGA
CTACTGGGGCCAGGGCACCCTGGTGACAGTCTCCT
CTGGAGGTGGCGGCTCCGACATCCAGATGACTCAG
AGCCCAAGCTCCTTGTCCGCATCTGTTGGCGATCG
AGTGACCATTACCTGCCGGGCTAGCCAGTCTGTAT
CTTCTGCCGTGGCCTGGTACCAGCAAAAGCCAGGC
AAGGCTCCCAAACTGCTGATTTATAGTGCTTCTGA
TCTGTACTCCGGCGTTCCATCTCGATTTAGCGGGT
CCCGCTCCGGAACCGATTTCACACTCACAATTTCC
AGTCTCCAGCCTGAGGACTTCGCCACATACTACTG
CCAACAATACGCGGGTGCCGGGCTGATCACCTTTG
GACAAGGGACAAAGGTGGAGAT
CAAATAATAG (SEQ ID NO: 1034)
Mature ANT39i HC hole LALAPS
nucleotide sequence
GAAGTTCAGCTCGTGGAGTCCGGTGGAGGCCTGGT
GCAACCTGGAGGCTCTCTGCGGCTCAGTTGTGCTG
CTAGTGGATTCACACTGAGCTCATACTCTATGCAT
TGGGTCAGACAAGCTCCTGGCAAGGGGCTGGAATG
GGTAGCCTACATTAGCTCATATGACAGTATCACTG
ACTATGCGGATTCTGTGAAAGGCAGATTCACCATC
TCCGCTGATACCTCTAAGAACACAGCCTACTTGCA
AATGAATTCTTTGAGGGCTGAGGACACCGCCGTCT
ATTACTGCGCCCGCCCTGCCGTCGGCCACATGGCC
TTTGATTATTGGGGCCAGGGCACCCTGGTGACAGT
TAGTTCCGCTAGCACCAAGGGCCCATCGGTCTTCC
CCCTGGCACCCTCCTCCAAGAGCACCTCTGGGGGC
ACAGCGGCCCTGGGCTGCCTGGTCAAGGACTACTT
CCCCGAACCGGTGACGGTGTCGTGGAACTCAGGCG
CCCTGACCAGCGGCGTGCACACCTTCCCGGCCGTC
CTACAGTCCTCAGGACTCTACTCCCTCAGCAGCGT
GGTGACCGTGCCCTCCAGCAGCTTGGGCACCCAGA
CCTACATCTGCAACGTGAATCACAAGCCCAGCAAC
ACCAAGGTGGACAAGAAGGTTGAGCCCAAATCTTG
TGACAAAACTCACACATGCCCACCGTGCCCAGCAC
CTGAAGCCGCCGGGGGACCGTCAGTCTTCCTCTTC
CCCCCAAAACCCAAGGACACCCTCATGATCTCCCG
GACCCCTGAGGTCACATGCGTGGTGGTGGACGTGA
GCCACGAAGACCCTGAGGTCAAGTTCAACTGGTAC
GTGGACGGCGTGGAGGTGCATAATGCCAAGACAAA
GCCGCGGGAGGAGCAGTACAACAGCACGTACCGTG
TGGTCAGCGTCCTCACCGTCCTGCACCAGGACTGG
CTGAATGGCAAGGAGTACAAGTGCAAGGTCTCCAA
CAAAGCCCTCCCAGCCTCCATCGAGAAAACCATCT
CCAAAGCCAAAGGGCAGCCCCGAGAACCACAGGTG
TACACCCTGCCCCCAATCCGGGAGCTGATGACCTC
CAACCAGGTCAGCCTGAGCTGCGCCGTCAAAGGCT
TCTATCCCAGCGACATCGCCGTGGAGTGGGAGAGC
AATGGGCAGCCGGAGAACAACTACAAGACCACGCC
TCCCGTGCTGGACTCCGACGGCTCCTTCTTCCTCG
TGAGCAAGCTCACCGTGGACAAGAGCAGGTGGCAG
CAGGGGAACGTCTTCTCATGCTCCGTGATGCATGA
GGCTCTGCACAACCACTACACGCAGAAGAGCCTCT
CCCTGTCTCCGGGCAAAGGTGGAGGCAGTGGTGGA
GGATCTGGCGGTGGCAGTGGCGGTGGTAGCGGGTC
CACGGGGGAGGTCCAATTGGTGGAATCTGGTGGCG
GTTTAGTCCAACCGGGTGGCTCCCTCCGGCTGTCC
TGCGCTGCTAGTGGCTTCGATTTTAGCTCCTCTTC
TATCCACTGGGTCAGACAGGCTCCTGGCAAGGGTC
TCGAATGGGTGGCCTCTATCTCCTCTTCCTACGGA
TATACCTATTATGCTGACTCTGTTAAAGGCCGCTT
TACCATCTCTGCCGATACCAGCAAGAACACAGCTT
ATCTGCAAATGAATTCTCTCCGCGCCGAGGACACT
GCCGTCTACTACTGCGCACGTTCTTGGGCCATGGA
CTACTGGGGCCAGGGCACCCTGGTGACAGTCTCCT
CTGGAGGTGGCGGCTCCGACATCCAGATGACTCAG
AGCCCAAGCTCCTTGTCCGCATCTGTTGGCGATCG
AGTGACCATTACCTGCCGGGCTAGCCAGTCTGTAT
CTTCTGCCGTGGCCTGGTACCAGCAAAAGCCAGGC
AAGGCTCCCAAACTGCTGATTTATAGTGCTTCTGA
TCTGTACTCCGGCGTTCCATCTCGATTTAGCGGGT
CCCGCTCCGGAACCGATTTCACACTCACAATTTCC
AGTCTCCAGCCTGAGGACTTCGCCACATACTACTG
CCAACAATACGCGGGTGCCGGGCTGATCACCTTTG
GACAAGGGACAAAGGTGGAGAT
CAAATAATAG (SEQ ID NO: 1035)
Mature ANT39i HC hole LALAPS
Merchant nucleotide sequence
GAAGTTCAGCTCGTGGAGTCCGGTGGAGGCCTGGT
GCAACCTGGAGGCTCTCTGCGGCTCAGTTGTGCTG
CTAGTGGATTCACACTGAGCTCATACTCTATGCAT
TGGGTCAGACAAGCTCCTGGCAAGGGGCTGGAATG
GGTAGCCTACATTAGCTCATATGACAGTATCACTG
ACTATGCGGATTCTGTGAAAGGCAGATTCACCATC
TCCGCTGATACCTCTAAGAACACAGCCTACTTGCA
AATGAATTCTTTGAGGGCTGAGGACACCGCCGTCT
ATTACTGCGCCCGCCCTGCCGTCGGCCACATGGCC
TTTGATTATTGGGGCCAGGGCACCCTGGTGACAGT
TAGTTCCGCTAGCACCAAGGGCCCATCGGTCTTCC
CCCTGGCACCCTCCTCCAAGAGCACCTCTGGGGGC
ACAGCGGCCCTGGGCTGCCTGGTCAAGGACTACTT
CCCCGAACCGGTGACGGTGTCGTGGAACTCAGGCG
CCCTGACCAGCGGCGTGCACACCTTCCCGGCCGTC
CTACAGTCCTCAGGACTCTACTCCCTCAGCAGCGT
GGTGACCGTGCCCTCCAGCAGCTTGGGCACCCAGA
CCTACATCTGCAACGTGAATCACAAGCCCAGCAAC
ACCAAGGTGGACAAGAAGGTTGAGCCCAAATCTTG
TGACAAAACTCACACATGCCCACCGTGCCCAGCAC
CTGAAGCCGCCGGGGGACCGTCAGTCTTCCTCTTC
CCCCCAAAACCCAAGGACACCCTCATGATCTCCCG
GACCCCTGAGGTCACATGCGTGGTGGTGGACGTGA
GCCACGAAGACCCTGAGGTCAAGTTCAACTGGTAC
GTGGACGGCGTGGAGGTGCATAATGCCAAGACAAA
GCCGCGGGAGGAGCAGTACAACAGCACGTACCGTG
TGGTCAGCGTCCTCACCGTCCTGCACCAGGACTGG
CTGAATGGCAAGGAGTACAAGTGCAAGGTCTCCAA
CAAAGCCCTCCCAGCCTCCATCGAGAAAACCATCT
CCAAAGCCAAAGGGCAGCCCCGAGAACCACAGGTG
TACACCCTGCCCCCATCCCGGGAGGAGATGACCAA
GAACCAGGTCAGCCTGAGCTGCGCCGTCAAAGGCT
TCTATCCCAGCGACATCGCCGTGGAGTGGGAGAGC
AATGGGCAGCCGGAGAACAACTACAAGACCACGCC
TCCCGTGCTGGACTCCGACGGCTCCTTCTTCCTCG
TGAGCAAGCTCACCGTGGACAAGAGCAGGTGGCAG
CAGGGGAACGTCTTCTCATGCTCCGTGATGCATGA
GGCTCTGCACAACCACTACACGCAGAAGAGCCTCT
CCCTGTCTCCGGGCAAAGGTGGAGGCAGTGGTGGA
GGATCTGGCGGTGGCAGTGGCGGTGGTAGCGGGTC
CACGGGGGAGGTCCAATTGGTGGAATCTGGTGGCG
GTTTAGTCCAACCGGGTGGCTCCCTCCGGCTGTCC
TGCGCTGCTAGTGGCTTCGATTTTAGCTCCTCTTC
TATCCACTGGGTCAGACAGGCTCCTGGCAAGGGTC
TCGAATGGGTGGCCTCTATCTCCTCTTCCTACGGA
TATACCTATTATGCTGACTCTGTTAAAGGCCGCTT
TACCATCTCTGCCGATACCAGCAAGAACACAGCTT
ATCTGCAAATGAATTCTCTCCGCGCCGAGGACACT
GCCGTCTACTACTGCGCACGTTCTTGGGCCATGGA
CTACTGGGGCCAGGGCACCCTGGTGACAGTCTCCT
CTGGAGGTGGCGGCTCCGACATCCAGATGACTCAG
AGCCCAAGCTCCTTGTCCGCATCTGTTGGCGATCG
AGTGACCATTACCTGCCGGGCTAGCCAGTCTGTAT
CTTCTGCCGTGGCCTGGTACCAGCAAAAGCCAGGC
AAGGCTCCCAAACTGCTGATTTATAGTGCTTCTGA
TCTGTACTCCGGCGTTCCATCTCGATTTAGCGGGT
CCCGCTCCGGAACCGATTTCACACTCACAATTTCC
AGTCTCCAGCCTGAGGACTTCGCCACATACTACTG
CCAACAATACGCGGGTGCCGGGCTGATCACCTTTG
GACAAGGGACAAAGGTGGAGA
TCAAATAATAG (SEQ ID NO: 1036)
Mature ANT39i HC hole LALAPS
Merchant S-S nucleotide sequence
GAAGTTCAGCTCGTGGAGTCCGGTGGAGGCCTGGT
GCAACCTGGAGGCTCTCTGCGGCTCAGTTGTGCTG
CTAGTGGATTCACACTGAGCTCATACTCTATGCAT
TGGGTCAGACAAGCTCCTGGCAAGGGGCTGGAATG
GGTAGCCTACATTAGCTCATATGACAGTATCACTG
ACTATGCGGATTCTGTGAAAGGCAGATTCACCATC
TCCGCTGATACCTCTAAGAACACAGCCTACTTGCA
AATGAATTCTTTGAGGGCTGAGGACACCGCCGTCT
ATTACTGCGCCCGCCCTGCCGTCGGCCACATGGCC
TTTGATTATTGGGGCCAGGGCACCCTGGTGACAGT
TAGTTCCGCTAGCACCAAGGGCCCATCGGTCTTCC
CCCTGGCACCCTCCTCCAAGAGCACCTCTGGGGGC
ACAGCGGCCCTGGGCTGCCTGGTCAAGGACTACTT
CCCCGAACCGGTGACGGTGTCGTGGAACTCAGGCG
CCCTGACCAGCGGCGTGCACACCTTCCCGGCCGTC
CTACAGTCCTCAGGACTCTACTCCCTCAGCAGCGT
GGTGACCGTGCCCTCCAGCAGCTTGGGCACCCAGA
CCTACATCTGCAACGTGAATCACAAGCCCAGCAAC
ACCAAGGTGGACAAGAAGGTTGAGCCCAAATCTTG
TGACAAAACTCACACATGCCCACCGTGCCCAGCAC
CTGAAGCCGCCGGGGGACCGTCAGTCTTCCTCTTC
CCCCCAAAACCCAAGGACACCCTCATGATCTCCCG
GACCCCTGAGGTCACATGCGTGGTGGTGGACGTGA
GCCACGAAGACCCTGAGGTCAAGTTCAACTGGTAC
GTGGACGGCGTGGAGGTGCATAATGCCAAGACAAA
GCCGCGGGAGGAGCAGTACAACAGCACGTACCGTG
TGGTCAGCGTCCTCACCGTCCTGCACCAGGACTGG
CTGAATGGCAAGGAGTACAAGTGCAAGGTCTCCAA
CAAAGCCCTCCCAGCCTCCATCGAGAAAACCATCT
CCAAAGCCAAAGGGCAGCCCCGAGAACCACAGGTG
TGCACCCTGCCCCCATCCCGGGAGGAGATGACCAA
GAACCAGGTCAGCCTGAGCTGCGCCGTCAAAGGCT
TCTATCCCAGCGACATCGCCGTGGAGTGGGAGAGC
AATGGGCAGCCGGAGAACAACTACAAGACCACGCC
TCCCGTGCTGGACTCCGACGGCTCCTTCTTCCTCG
TGAGCAAGCTCACCGTGGACAAGAGCAGGTGGCAG
CAGGGGAACGTCTTCTCATGCTCCGTGATGCATGA
GGCTCTGCACAACCACTACACGCAGAAGAGCCTCT
CCCTGTCTCCGGGCAAAGGTGGAGGCAGTGGTGGA
GGATCTGGCGGTGGCAGTGGCGGTGGTAGCGGGTC
CACGGGGGAGGTCCAATTGGTGGAATCTGGTGGCG
GTTTAGTCCAACCGGGTGGCTCCCTCCGGCTGTCC
TGCGCTGCTAGTGGCTTCGATTTTAGCTCCTCTTC
TATCCACTGGGTCAGACAGGCTCCTGGCAAGGGTC
TCGAATGGGTGGCCTCTATCTCCTCTTCCTACGGA
TATACCTATTATGCTGACTCTGTTAAAGGCCGCTT
TACCATCTCTGCCGATACCAGCAAGAACACAGCTT
ATCTGCAAATGAATTCTCTCCGCGCCGAGGACACT
GCCGTCTACTACTGCGCACGTTCTTGGGCCATGGA
CTACTGGGGCCAGGGCACCCTGGTGACAGTCTCCT
CTGGAGGTGGCGGCTCCGACATCCAGATGACTCAG
AGCCCAAGCTCCTTGTCCGCATCTGTTGGCGATCG
AGTGACCATTACCTGCCGGGCTAGCCAGTCTGTAT
CTTCTGCCGTGGCCTGGTACCAGCAAAAGCCAGGC
AAGGCTCCCAAACTGCTGATTTATAGTGCTTCTGA
TCTGTACTCCGGCGTTCCATCTCGATTTAGCGGGT
CCCGCTCCGGAACCGATTTCACACTCACAATTTCC
AGTCTCCAGCCTGAGGACTTCGCCACATACTACTG
CCAACAATACGCGGGTGCCGGGCTGATCACCTTTG
GACAAGGGACAAAGGTGGAGA
TCAAATAATAG (SEQ ID NO: 1037)
ANT39i HC knob DANG nucleotide
sequence
ATGGGATGGTCATGTATCATCCTTTTTCTGGTAGC
AACTGCAACTGGAGTACATAGCGAAGTGCAGTTGG
TGGAGTCTGGCGGTGGCTTGGTCCAACCGGGTGGC
AGCCTGAGGCTGAGCTGTGCCGCAAGTGGCTTCAC
ACTAAGTTCTTACTCCATGCATTGGGTTAGGCAAG
CTCCTGGCAAGGGTCTGGAATGGGTAGCCTACATC
TCTTCCTATGATTCAATTACTGACTACGCGGACAG
TGTCAAGGGGAGATTCACGATAAGTGCCGACACCT
CCAAGAACACAGCTTACTTGCAAATGAATAGCCTG
CGAGCTGAGGACACAGCTGTTTACTACTGTGCTAG
GCCAGCCGTTGGGCACATGGCCTTTGATTATTGGG
GCCAGGGCACCCTGGTGACAGTTAGTTCTGCTAGC
ACCAAGGGCCCATCGGTCTTCCCCCTGGCACCCTC
CTCCAAGAGCACCTCTGGGGGCACAGCGGCCCTGG
GCTGCCTGGTCAAGGACTACTTCCCCGAACCGGTG
ACGGTGTCGTGGAACTCAGGCGCCCTGACCAGCGG
CGTGCACACCTTCCCGGCCGTCCTACAGTCCTCAG
GACTCTACTCCCTCAGCAGCGTGGTGACCGTGCCC
TCCAGCAGCTTGGGCACCCAGACCTACATCTGCAA
CGTGAATCACAAGCCCAGCAACACCAAGGTGGACA
AGAAGGTTGAGCCCAAATCTTGTGACAAAACTCAC
ACATGCCCACCGTGCCCAGCACCTGAACTCCTGGG
GGGACCGTCAGTCTTCCTCTTCCCCCCAAAACCCA
AGGACACCCTCATGATCTCCCGGACCCCTGAGGTC
ACATGCGTGGTGGTGGCCGTGAGCCACGAAGACCC
TGAGGTCAAGTTCAACTGGTACGTGGACGGCGTGG
AGGTGCATAATGCCAAGACAAAGCCGCGGGAGGAG
CAGTACGGCAGCACGTACCGTGTGGTCAGCGTCCT
CACCGTCCTGCACCAGGACTGGCTGAATGGCAAGG
AGTACAAGTGCAAGGTCTCCAACAAAGCCCTCCCA
GCCCCCATCGAGAAAACCATCTCCAAAGCCAAAGG
GCAGCCCCGAGAACCAATGGTGTTCGACCTGCCCC
CATCCCGGGAGGAGATGACCAAGAACCAGGTCAGC
CTGTGGTGCATGGTCAAAGGCTTCTATCCCAGCGA
CATCGCCGTGGAGTGGGAGAGCAATGGGCAGCCGG
AGAACAACTACAAGACCACGCCTCCCGTGCTGGAC
TCCGACGGCTCCTTCTTCCTCTACAGCAAGCTCAC
CGTGGACAAGAGCAGGTGGCAGCAGGGGAACGTCT
TCTCATGCTCCGTGATGCATGAGGCTCTGCACAAC
CACTACACGCAGAAGAGCCTCTCCCTGTCTCCGGG
CAAAGGTGGAGGCTCCGGCGGTGGCTCTGGCGGCG
GTTCTGGCGGTGGTTCTGGTAGCACGGGCGAAGTC
CAATTGGTGGAGAGTGGTGGCGGACTAGTGCAACC
CGGCGGCTCCTTGCGACTCAGCTGCGCTGCTAGCG
GTTTTGACTTTACTGCCTACGCCATGCACTGGGTT
AGGCAGGCTCCCGGCAAGGGCCTGGAATGGGTTGC
CTCTATCTATCCTAGTGGCGGCTATACCGCCTATG
CCGACTCTGTCAAGGGCCGATTCACCATTAGTGCT
GACACTTCCAAGAACACAGCTTATCTGCAAATGAA
CAGTTTACGTGCTGAGGACACCGCCGTGTACTATT
GCGCGAGGCGCAGTTACTATTTCGCCCTGGATTAC
TGGGGCCAGGGCACACTGGTGACAGTGTCTAGCGG
AGGTGGTGGCAGCGATATTCAGATGACACAGAGCC
CCAGTTCCCTGTCCGCATCCGTTGGAGACCGCGTC
ACCATCACCTGCCGGGCCAGTCAGTCTGTCTCAAG
TGCTGTTGCATGGTACCAACAAAAGCCTGGCAAAG
CACCTAAGCTCCTGATCTATTCCGCCTCTTCCCTG
TACTCTGGAGTTCCTTCTAGGTTTAGTGGCAGCCG
GAGTGGCACCGACTTCACATTGACTATTAGCTCTT
TGCAACCGGAGGATTTCGCTACCTACTACTGTCAA
CAATACTGGGCGTATTATTCGCCCATCACATTCGG
GCAAGGC
ACAAAGGTCGAGATCAAGTAATAG
(SEQ ID NO: 1038)
ANT39i HC knob LALAPS nucleotide
sequence
ATGGGATGGTCATGTATCATCCTTTTTCTGGTAGC
AACTGCAACTGGAGTACATAGCGAAGTGCAGTTGG
TGGAGTCTGGCGGTGGCTTGGTCCAACCGGGTGGC
AGCCTGAGGCTGAGCTGTGCCGCAAGTGGCTTCAC
ACTAAGTTCTTACTCCATGCATTGGGTTAGGCAAG
CTCCTGGCAAGGGTCTGGAATGGGTAGCCTACATC
TCTTCCTATGATTCAATTACTGACTACGCGGACAG
TGTCAAGGGGAGATTCACGATAAGTGCCGACACCT
CCAAGAACACAGCTTACTTGCAAATGAATAGCCTG
CGAGCTGAGGACACAGCTGTTTACTACTGTGCTAG
GCCAGCCGTTGGGCACATGGCCTTTGATTATTGGG
GCCAGGGCACCCTGGTGACAGTTAGTTCTGCTAGC
ACCAAGGGCCCATCGGTCTTCCCCCTGGCACCCTC
CTCCAAGAGCACCTCTGGGGGCACAGCGGCCCTGG
GCTGCCTGGTCAAGGACTACTTCCCCGAACCGGTG
ACGGTGTCGTGGAACTCAGGCGCCCTGACCAGCGG
CGTGCACACCTTCCCGGCCGTCCTACAGTCCTCAG
GACTCTACTCCCTCAGCAGCGTGGTGACCGTGCCC
TCCAGCAGCTTGGGCACCCAGACCTACATCTGCAA
CGTGAATCACAAGCCCAGCAACACCAAGGTGGACA
AGAAGGTTGAGCCCAAATCTTGTGACAAAACTCAC
ACATGCCCACCGTGCCCAGCACCTGAAGCCGCCGG
GGGACCGTCAGTCTTCCTCTTCCCCCCAAAACCCA
AGGACACCCTCATGATCTCCCGGACCCCTGAGGTC
ACATGCGTGGTGGTGGACGTGAGCCACGAAGACCC
TGAGGTCAAGTTCAACTGGTACGTGGACGGCGTGG
AGGTGCATAATGCCAAGACAAAGCCGCGGGAGGAG
CAGTACAACAGCACGTACCGTGTGGTCAGCGTCCT
CACCGTCCTGCACCAGGACTGGCTGAATGGCAAGG
AGTACAAGTGCAAGGTCTCCAACAAAGCCCTCCCA
GCCTCCATCGAGAAAACCATCTCCAAAGCCAAAGG
GCAGCCCCGAGAACCAATGGTGTTCGACCTGCCCC
CATCCCGGGAGGAGATGACCAAGAACCAGGTCAGC
CTGTGGTGCATGGTCAAAGGCTTCTATCCCAGCGA
CATCGCCGTGGAGTGGGAGAGCAATGGGCAGCCGG
AGAACAACTACAAGACCACGCCTCCCGTGCTGGAC
TCCGACGGCTCCTTCTTCCTCTACAGCAAGCTCAC
CGTGGACAAGAGCAGGTGGCAGCAGGGGAACGTCT
TCTCATGCTCCGTGATGCATGAGGCTCTGCACAAC
CACTACACGCAGAAGAGCCTCTCCCTGTCTCCGGG
CAAAGGTGGAGGCTCCGGCGGTGGCTCTGGCGGCG
GTTCTGGCGGTGGTTCTGGTAGCACGGGCGAAGTC
CAATTGGTGGAGAGTGGTGGCGGACTAGTGCAACC
CGGCGGCTCCTTGCGACTCAGCTGCGCTGCTAGCG
GTTTTGACTTTACTGCCTACGCCATGCACTGGGTT
AGGCAGGCTCCCGGCAAGGGCCTGGAATGGGTTGC
CTCTATCTATCCTAGTGGCGGCTATACCGCCTATG
CCGACTCTGTCAAGGGCCGATTCACCATTAGTGCT
GACACTTCCAAGAACACAGCTTATCTGCAAATGAA
CAGTTTACGTGCTGAGGACACCGCCGTGTACTATT
GCGCGAGGCGCAGTTACTATTTCGCCCTGGATTAC
TGGGGCCAGGGCACACTGGTGACAGTGTCTAGCGG
AGGTGGTGGCAGCGATATTCAGATGACACAGAGCC
CCAGTTCCCTGTCCGCATCCGTTGGAGACCGCGTC
ACCATCACCTGCCGGGCCAGTCAGTCTGTCTCAAG
TGCTGTTGCATGGTACCAACAAAAGCCTGGCAAAG
CACCTAAGCTCCTGATCTATTCCGCCTCTTCCCTG
TACTCTGGAGTTCCTTCTAGGTTTAGTGGCAGCCG
GAGTGGCACCGACTTCACATTGACTATTAGCTCTT
TGCAACCGGAGGATTTCGCTACCTACTACTGTCAA
CAATACTGGGCGTATTATTCGCCCATCACATTCGG
GCAAGGC
ACAAAGGTCGAGATCAAGTAATAG
(SEQ ID NO: 1039)
ANT39i HC knob LALAPS Merchant
nucleotide sequence
ATGGGATGGTCATGTATCATCCTTTTTCTGGTAGC
AACTGCAACTGGAGTACATAGCGAAGTGCAGTTGG
TGGAGTCTGGCGGTGGCTTGGTCCAACCGGGTGGC
AGCCTGAGGCTGAGCTGTGCCGCAAGTGGCTTCAC
ACTAAGTTCTTACTCCATGCATTGGGTTAGGCAAG
CTCCTGGCAAGGGTCTGGAATGGGTAGCCTACATC
TCTTCCTATGATTCAATTACTGACTACGCGGACAG
TGTCAAGGGGAGATTCACGATAAGTGCCGACACCT
CCAAGAACACAGCTTACTTGCAAATGAATAGCCTG
CGAGCTGAGGACACAGCTGTTTACTACTGTGCTAG
GCCAGCCGTTGGGCACATGGCCTTTGATTATTGGG
GCCAGGGCACCCTGGTGACAGTTAGTTCTGCTAGC
ACCAAGGGCCCATCGGTCTTCCCCCTGGCACCCTC
CTCCAAGAGCACCTCTGGGGGCACAGCGGCCCTGG
GCTGCCTGGTCAAGGACTACTTCCCCGAACCGGTG
ACGGTGTCGTGGAACTCAGGCGCCCTGACCAGCGG
CGTGCACACCTTCCCGGCCGTCCTACAGTCCTCAG
GACTCTACTCCCTCAGCAGCGTGGTGACCGTGCCC
TCCAGCAGCTTGGGCACCCAGACCTACATCTGCAA
CGTGAATCACAAGCCCAGCAACACCAAGGTGGACA
AGAAGGTTGAGCCCAAATCTTGTGACAAAACTCAC
ACATGCCCACCGTGCCCAGCACCTGAAGCCGCCGG
GGGACCGTCAGTCTTCCTCTTCCCCCCAAAACCCA
AGGACACCCTCATGATCTCCCGGACCCCTGAGGTC
ACATGCGTGGTGGTGGACGTGAGCCACGAAGACCC
TGAGGTCAAGTTCAACTGGTACGTGGACGGCGTGG
AGGTGCATAATGCCAAGACAAAGCCGCGGGAGGAG
CAGTACAACAGCACGTACCGTGTGGTCAGCGTCCT
CACCGTCCTGCACCAGGACTGGCTGAATGGCAAGG
AGTACAAGTGCAAGGTCTCCAACAAAGCCCTCCCA
GCCTCCATCGAGAAAACCATCTCCAAAGCCAAAGG
GCAGCCCCGAGAACCACAGGTGTACACCCTGCCCC
CATCCCGGGAGGAGATGACCAAGAACCAGGTCAGC
CTGTGGTGCCTGGTCAAAGGCTTCTATCCCAGCGA
CATCGCCGTGGAGTGGGAGAGCAATGGGCAGCCGG
AGAACAACTACAAGACCACGCCTCCCGTGCTGGAC
TCCGACGGCTCCTTCTTCCTCTACAGCAAGCTCAC
CGTGGACAAGAGCAGGTGGCAGCAGGGGAACGTCT
TCTCATGCTCCGTGATGCATGAGGCTCTGCACAAC
CACTACACGCAGAAGAGCCTCTCCCTGTCTCCGGG
CAAAGGTGGAGGCTCCGGCGGTGGCTCTGGCGGCG
GTTCTGGCGGTGGTTCTGGTAGCACGGGCGAAGTC
CAATTGGTGGAGAGTGGTGGCGGACTAGTGCAACC
CGGCGGCTCCTTGCGACTCAGCTGCGCTGCTAGCG
GTTTTGACTTTACTGCCTACGCCATGCACTGGGTT
AGGCAGGCTCCCGGCAAGGGCCTGGAATGGGTTGC
CTCTATCTATCCTAGTGGCGGCTATACCGCCTATG
CCGACTCTGTCAAGGGCCGATTCACCATTAGTGCT
GACACTTCCAAGAACACAGCTTATCTGCAAATGAA
CAGTTTACGTGCTGAGGACACCGCCGTGTACTATT
GCGCGAGGCGCAGTTACTATTTCGCCCTGGATTAC
TGGGGCCAGGGCACACTGGTGACAGTGTCTAGCGG
AGGTGGTGGCAGCGATATTCAGATGACACAGAGCC
CCAGTTCCCTGTCCGCATCCGTTGGAGACCGCGTC
ACCATCACCTGCCGGGCCAGTCAGTCTGTCTCAAG
TGCTGTTGCATGGTACCAACAAAAGCCTGGCAAAG
CACCTAAGCTCCTGATCTATTCCGCCTCTTCCCTG
TACTCTGGAGTTCCTTCTAGGTTTAGTGGCAGCCG
GAGTGGCACCGACTTCACATTGACTATTAGCTCTT
TGCAACCGGAGGATTTCGCTACCTACTACTGTCAA
CAATACTGGGCGTATTATTCGCCCATCACATTCGG
GCAAGGC
ACAAAGGTCGAGATCAAGTAATAG
(SEQ ID NO: 1040)
ANT39i HC knob LALAPS Merchant S-S
nucleotide sequence
ATGGGATGGTCATGTATCATCCTTTTTCTGGTAGC
AACTGCAACTGGAGTACATAGCGAAGTGCAGTTGG
TGGAGTCTGGCGGTGGCTTGGTCCAACCGGGTGGC
AGCCTGAGGCTGAGCTGTGCCGCAAGTGGCTTCAC
ACTAAGTTCTTACTCCATGCATTGGGTTAGGCAAG
CTCCTGGCAAGGGTCTGGAATGGGTAGCCTACATC
TCTTCCTATGATTCAATTACTGACTACGCGGACAG
TGTCAAGGGGAGATTCACGATAAGTGCCGACACCT
CCAAGAACACAGCTTACTTGCAAATGAATAGCCTG
CGAGCTGAGGACACAGCTGTTTACTACTGTGCTAG
GCCAGCCGTTGGGCACATGGCCTTTGATTATTGGG
GCCAGGGCACCCTGGTGACAGTTAGTTCTGCTAGC
ACCAAGGGCCCATCGGTCTTCCCCCTGGCACCCTC
CTCCAAGAGCACCTCTGGGGGCACAGCGGCCCTGG
GCTGCCTGGTCAAGGACTACTTCCCCGAACCGGTG
ACGGTGTCGTGGAACTCAGGCGCCCTGACCAGCGG
CGTGCACACCTTCCCGGCCGTCCTACAGTCCTCAG
GACTCTACTCCCTCAGCAGCGTGGTGACCGTGCCC
TCCAGCAGCTTGGGCACCCAGACCTACATCTGCAA
CGTGAATCACAAGCCCAGCAACACCAAGGTGGACA
AGAAGGTTGAGCCCAAATCTTGTGACAAAACTCAC
ACATGCCCACCGTGCCCAGCACCTGAAGCCGCCGG
GGGACCGTCAGTCTTCCTCTTCCCCCCAAAACCCA
AGGACACCCTCATGATCTCCCGGACCCCTGAGGTC
ACATGCGTGGTGGTGGACGTGAGCCACGAAGACCC
TGAGGTCAAGTTCAACTGGTACGTGGACGGCGTGG
AGGTGCATAATGCCAAGACAAAGCCGCGGGAGGAG
CAGTACAACAGCACGTACCGTGTGGTCAGCGTCCT
CACCGTCCTGCACCAGGACTGGCTGAATGGCAAGG
AGTACAAGTGCAAGGTCTCCAACAAAGCCCTCCCA
GCCTCCATCGAGAAAACCATCTCCAAAGCCAAAGG
GCAGCCCCGAGAACCACAGGTGTACACCCTGCCCC
CATGCCGGGAGGAGATGACCAAGAACCAGGTCAGC
CTGTGGTGCCTGGTCAAAGGCTTCTATCCCAGCGA
CATCGCCGTGGAGTGGGAGAGCAATGGGCAGCCGG
AGAACAACTACAAGACCACGCCTCCCGTGCTGGAC
TCCGACGGCTCCTTCTTCCTCTACAGCAAGCTCAC
CGTGGACAAGAGCAGGTGGCAGCAGGGGAACGTCT
TCTCATGCTCCGTGATGCATGAGGCTCTGCACAAC
CACTACACGCAGAAGAGCCTCTCCCTGTCTCCGGG
CAAAGGTGGAGGCTCCGGCGGTGGCTCTGGCGGCG
GTTCTGGCGGTGGTTCTGGTAGCACGGGCGAAGTC
CAATTGGTGGAGAGTGGTGGCGGACTAGTGCAACC
CGGCGGCTCCTTGCGACTCAGCTGCGCTGCTAGCG
GTTTTGACTTTACTGCCTACGCCATGCACTGGGTT
AGGCAGGCTCCCGGCAAGGGCCTGGAATGGGTTGC
CTCTATCTATCCTAGTGGCGGCTATACCGCCTATG
CCGACTCTGTCAAGGGCCGATTCACCATTAGTGCT
GACACTTCCAAGAACACAGCTTATCTGCAAATGAA
CAGTTTACGTGCTGAGGACACCGCCGTGTACTATT
GCGCGAGGCGCAGTTACTATTTCGCCCTGGATTAC
TGGGGCCAGGGCACACTGGTGACAGTGTCTAGCGG
AGGTGGTGGCAGCGATATTCAGATGACACAGAGCC
CCAGTTCCCTGTCCGCATCCGTTGGAGACCGCGTC
ACCATCACCTGCCGGGCCAGTCAGTCTGTCTCAAG
TGCTGTTGCATGGTACCAACAAAAGCCTGGCAAAG
CACCTAAGCTCCTGATCTATTCCGCCTCTTCCCTG
TACTCTGGAGTTCCTTCTAGGTTTAGTGGCAGCCG
GAGTGGCACCGACTTCACATTGACTATTAGCTCTT
TGCAACCGGAGGATTTCGCTACCTACTACTGTCAA
CAATACTGGGCGTATTATTCGCCCATCACATTCGG
GCAAGGC
ACAAAGGTCGAGATCAAGTAATAG
(SEQ ID NO: 1041)
Mature ANT39i HC knob DANG
nucleotide sequence
GAAGTGCAGTTGGTGGAGTCTGGCGGTGGCTTGGT
CCAACCGGGTGGCAGCCTGAGGCTGAGCTGTGCCG
CAAGTGGCTTCACACTAAGTTCTTACTCCATGCAT
TGGGTTAGGCAAGCTCCTGGCAAGGGTCTGGAATG
GGTAGCCTACATCTCTTCCTATGATTCAATTACTG
ACTACGCGGACAGTGTCAAGGGGAGATTCACGATA
AGTGCCGACACCTCCAAGAACACAGCTTACTTGCA
AATGAATAGCCTGCGAGCTGAGGACACAGCTGTTT
ACTACTGTGCTAGGCCAGCCGTTGGGCACATGGCC
TTTGATTATTGGGGCCAGGGCACCCTGGTGACAGT
TAGTTCTGCTAGCACCAAGGGCCCATCGGTCTTCC
CCCTGGCACCCTCCTCCAAGAGCACCTCTGGGGGC
ACAGCGGCCCTGGGCTGCCTGGTCAAGGACTACTT
CCCCGAACCGGTGACGGTGTCGTGGAACTCAGGCG
CCCTGACCAGCGGCGTGCACACCTTCCCGGCCGTC
CTACAGTCCTCAGGACTCTACTCCCTCAGCAGCGT
GGTGACCGTGCCCTCCAGCAGCTTGGGCACCCAGA
CCTACATCTGCAACGTGAATCACAAGCCCAGCAAC
ACCAAGGTGGACAAGAAGGTTGAGCCCAAATCTTG
TGACAAAACTCACACATGCCCACCGTGCCCAGCAC
CTGAACTCCTGGGGGGACCGTCAGTCTTCCTCTTC
CCCCCAAAACCCAAGGACACCCTCATGATCTCCCG
GACCCCTGAGGTCACATGCGTGGTGGTGGCCGTGA
GCCACGAAGACCCTGAGGTCAAGTTCAACTGGTAC
GTGGACGGCGTGGAGGTGCATAATGCCAAGACAAA
GCCGCGGGAGGAGCAGTACGGCAGCACGTACCGTG
TGGTCAGCGTCCTCACCGTCCTGCACCAGGACTGG
CTGAATGGCAAGGAGTACAAGTGCAAGGTCTCCAA
CAAAGCCCTCCCAGCCCCCATCGAGAAAACCATCT
CCAAAGCCAAAGGGCAGCCCCGAGAACCAATGGTG
TTCGACCTGCCCCCATCCCGGGAGGAGATGACCAA
GAACCAGGTCAGCCTGTGGTGCATGGTCAAAGGCT
TCTATCCCAGCGACATCGCCGTGGAGTGGGAGAGC
AATGGGCAGCCGGAGAACAACTACAAGACCACGCC
TCCCGTGCTGGACTCCGACGGCTCCTTCTTCCTCT
ACAGCAAGCTCACCGTGGACAAGAGCAGGTGGCAG
CAGGGGAACGTCTTCTCATGCTCCGTGATGCATGA
GGCTCTGCACAACCACTACACGCAGAAGAGCCTCT
CCCTGTCTCCGGGCAAAGGTGGAGGCTCCGGCGGT
GGCTCTGGCGGCGGTTCTGGCGGTGGTTCTGGTAG
CACGGGCGAAGTCCAATTGGTGGAGAGTGGTGGCG
GACTAGTGCAACCCGGCGGCTCCTTGCGACTCAGC
TGCGCTGCTAGCGGTTTTGACTTTACTGCCTACGC
CATGCACTGGGTTAGGCAGGCTCCCGGCAAGGGCC
TGGAATGGGTTGCCTCTATCTATCCTAGTGGCGGC
TATACCGCCTATGCCGACTCTGTCAAGGGCCGATT
CACCATTAGTGCTGACACTTCCAAGAACACAGCTT
ATCTGCAAATGAACAGTTTACGTGCTGAGGACACC
GCCGTGTACTATTGCGCGAGGCGCAGTTACTATTT
CGCCCTGGATTACTGGGGCCAGGGCACACTGGTGA
CAGTGTCTAGCGGAGGTGGTGGCAGCGATATTCAG
ATGACACAGAGCCCCAGTTCCCTGTCCGCATCCGT
TGGAGACCGCGTCACCATCACCTGCCGGGCCAGTC
AGTCTGTCTCAAGTGCTGTTGCATGGTACCAACAA
AAGCCTGGCAAAGCACCTAAGCTCCTGATCTATTC
CGCCTCTTCCCTGTACTCTGGAGTTCCTTCTAGGT
TTAGTGGCAGCCGGAGTGGCACCGACTTCACATTG
ACTATTAGCTCTTTGCAACCGGAGGATTTCGCTAC
CTACTACTGTCAACAATACTGGGCGTATTATTCGC
CCATCACATTCGGGCAAGG
CACAAAGGTCGAGATCAAGTAATAG
(SEQ ID NO: 1042)
Mature ANT39i HC knob LALAPS
nucleotide sequence
GAAGTGCAGTTGGTGGAGTCTGGCGGTGGCTTGGT
CCAACCGGGTGGCAGCCTGAGGCTGAGCTGTGCCG
CAAGTGGCTTCACACTAAGTTCTTACTCCATGCAT
TGGGTTAGGCAAGCTCCTGGCAAGGGTCTGGAATG
GGTAGCCTACATCTCTTCCTATGATTCAATTACTG
ACTACGCGGACAGTGTCAAGGGGAGATTCACGATA
AGTGCCGACACCTCCAAGAACACAGCTTACTTGCA
AATGAATAGCCTGCGAGCTGAGGACACAGCTGTTT
ACTACTGTGCTAGGCCAGCCGTTGGGCACATGGCC
TTTGATTATTGGGGCCAGGGCACCCTGGTGACAGT
TAGTTCTGCTAGCACCAAGGGCCCATCGGTCTTCC
CCCTGGCACCCTCCTCCAAGAGCACCTCTGGGGGC
ACAGCGGCCCTGGGCTGCCTGGTCAAGGACTACTT
CCCCGAACCGGTGACGGTGTCGTGGAACTCAGGCG
CCCTGACCAGCGGCGTGCACACCTTCCCGGCCGTC
CTACAGTCCTCAGGACTCTACTCCCTCAGCAGCGT
GGTGACCGTGCCCTCCAGCAGCTTGGGCACCCAGA
CCTACATCTGCAACGTGAATCACAAGCCCAGCAAC
ACCAAGGTGGACAAGAAGGTTGAGCCCAAATCTTG
TGACAAAACTCACACATGCCCACCGTGCCCAGCAC
CTGAAGCCGCCGGGGGACCGTCAGTCTTCCTCTTC
CCCCCAAAACCCAAGGACACCCTCATGATCTCCCG
GACCCCTGAGGTCACATGCGTGGTGGTGGACGTGA
GCCACGAAGACCCTGAGGTCAAGTTCAACTGGTAC
GTGGACGGCGTGGAGGTGCATAATGCCAAGACAAA
GCCGCGGGAGGAGCAGTACAACAGCACGTACCGTG
TGGTCAGCGTCCTCACCGTCCTGCACCAGGACTGG
CTGAATGGCAAGGAGTACAAGTGCAAGGTCTCCAA
CAAAGCCCTCCCAGCCTCCATCGAGAAAACCATCT
CCAAAGCCAAAGGGCAGCCCCGAGAACCAATGGTG
TTCGACCTGCCCCCATCCCGGGAGGAGATGACCAA
GAACCAGGTCAGCCTGTGGTGCATGGTCAAAGGCT
TCTATCCCAGCGACATCGCCGTGGAGTGGGAGAGC
AATGGGCAGCCGGAGAACAACTACAAGACCACGCC
TCCCGTGCTGGACTCCGACGGCTCCTTCTTCCTCT
ACAGCAAGCTCACCGTGGACAAGAGCAGGTGGCAG
CAGGGGAACGTCTTCTCATGCTCCGTGATGCATGA
GGCTCTGCACAACCACTACACGCAGAAGAGCCTCT
CCCTGTCTCCGGGCAAAGGTGGAGGCTCCGGCGGT
GGCTCTGGCGGCGGTTCTGGCGGTGGTTCTGGTAG
CACGGGCGAAGTCCAATTGGTGGAGAGTGGTGGCG
GACTAGTGCAACCCGGCGGCTCCTTGCGACTCAGC
TGCGCTGCTAGCGGTTTTGACTTTACTGCCTACGC
CATGCACTGGGTTAGGCAGGCTCCCGGCAAGGGCC
TGGAATGGGTTGCCTCTATCTATCCTAGTGGCGGC
TATACCGCCTATGCCGACTCTGTCAAGGGCCGATT
CACCATTAGTGCTGACACTTCCAAGAACACAGCTT
ATCTGCAAATGAACAGTTTACGTGCTGAGGACACC
GCCGTGTACTATTGCGCGAGGCGCAGTTACTATTT
CGCCCTGGATTACTGGGGCCAGGGCACACTGGTGA
CAGTGTCTAGCGGAGGTGGTGGCAGCGATATTCAG
ATGACACAGAGCCCCAGTTCCCTGTCCGCATCCGT
TGGAGACCGCGTCACCATCACCTGCCGGGCCAGTC
AGTCTGTCTCAAGTGCTGTTGCATGGTACCAACAA
AAGCCTGGCAAAGCACCTAAGCTCCTGATCTATTC
CGCCTCTTCCCTGTACTCTGGAGTTCCTTCTAGGT
TTAGTGGCAGCCGGAGTGGCACCGACTTCACATTG
ACTATTAGCTCTTTGCAACCGGAGGATTTCGCTAC
CTACTACTGTCAACAATACTGGGCGTATTATTCGC
CCATCACATTCGGGCAAGG
CACAAAGGTCGAGATCAAGTAATAG
(SEQ ID NO: 1043)
Mature ANT39i HC knob LALAPS
Merchant nucleotide sequence
GAAGTGCAGTTGGTGGAGTCTGGCGGTGGCTTGGT
CCAACCGGGTGGCAGCCTGAGGCTGAGCTGTGCCG
CAAGTGGCTTCACACTAAGTTCTTACTCCATGCAT
TGGGTTAGGCAAGCTCCTGGCAAGGGTCTGGAATG
GGTAGCCTACATCTCTTCCTATGATTCAATTACTG
ACTACGCGGACAGTGTCAAGGGGAGATTCACGATA
AGTGCCGACACCTCCAAGAACACAGCTTACTTGCA
AATGAATAGCCTGCGAGCTGAGGACACAGCTGTTT
ACTACTGTGCTAGGCCAGCCGTTGGGCACATGGCC
TTTGATTATTGGGGCCAGGGCACCCTGGTGACAGT
TAGTTCTGCTAGCACCAAGGGCCCATCGGTCTTCC
CCCTGGCACCCTCCTCCAAGAGCACCTCTGGGGGC
ACAGCGGCCCTGGGCTGCCTGGTCAAGGACTACTT
CCCCGAACCGGTGACGGTGTCGTGGAACTCAGGCG
CCCTGACCAGCGGCGTGCACACCTTCCCGGCCGTC
CTACAGTCCTCAGGACTCTACTCCCTCAGCAGCGT
GGTGACCGTGCCCTCCAGCAGCTTGGGCACCCAGA
CCTACATCTGCAACGTGAATCACAAGCCCAGCAAC
ACCAAGGTGGACAAGAAGGTTGAGCCCAAATCTTG
TGACAAAACTCACACATGCCCACCGTGCCCAGCAC
CTGAAGCCGCCGGGGGACCGTCAGTCTTCCTCTTC
CCCCCAAAACCCAAGGACACCCTCATGATCTCCCG
GACCCCTGAGGTCACATGCGTGGTGGTGGACGTGA
GCCACGAAGACCCTGAGGTCAAGTTCAACTGGTAC
GTGGACGGCGTGGAGGTGCATAATGCCAAGACAAA
GCCGCGGGAGGAGCAGTACAACAGCACGTACCGTG
TGGTCAGCGTCCTCACCGTCCTGCACCAGGACTGG
CTGAATGGCAAGGAGTACAAGTGCAAGGTCTCCAA
CAAAGCCCTCCCAGCCTCCATCGAGAAAACCATCT
CCAAAGCCAAAGGGCAGCCCCGAGAACCACAGGTG
TACACCCTGCCCCCATCCCGGGAGGAGATGACCAA
GAACCAGGTCAGCCTGTGGTGCCTGGTCAAAGGCT
TCTATCCCAGCGACATCGCCGTGGAGTGGGAGAGC
AATGGGCAGCCGGAGAACAACTACAAGACCACGCC
TCCCGTGCTGGACTCCGACGGCTCCTTCTTCCTCT
ACAGCAAGCTCACCGTGGACAAGAGCAGGTGGCAG
CAGGGGAACGTCTTCTCATGCTCCGTGATGCATGA
GGCTCTGCACAACCACTACACGCAGAAGAGCCTCT
CCCTGTCTCCGGGCAAAGGTGGAGGCTCCGGCGGT
GGCTCTGGCGGCGGTTCTGGCGGTGGTTCTGGTAG
CACGGGCGAAGTCCAATTGGTGGAGAGTGGTGGCG
GACTAGTGCAACCCGGCGGCTCCTTGCGACTCAGC
TGCGCTGCTAGCGGTTTTGACTTTACTGCCTACGC
CATGCACTGGGTTAGGCAGGCTCCCGGCAAGGGCC
TGGAATGGGTTGCCTCTATCTATCCTAGTGGCGGC
TATACCGCCTATGCCGACTCTGTCAAGGGCCGATT
CACCATTAGTGCTGACACTTCCAAGAACACAGCTT
ATCTGCAAATGAACAGTTTACGTGCTGAGGACACC
GCCGTGTACTATTGCGCGAGGCGCAGTTACTATTT
CGCCCTGGATTACTGGGGCCAGGGCACACTGGTGA
CAGTGTCTAGCGGAGGTGGTGGCAGCGATATTCAG
ATGACACAGAGCCCCAGTTCCCTGTCCGCATCCGT
TGGAGACCGCGTCACCATCACCTGCCGGGCCAGTC
AGTCTGTCTCAAGTGCTGTTGCATGGTACCAACAA
AAGCCTGGCAAAGCACCTAAGCTCCTGATCTATTC
CGCCTCTTCCCTGTACTCTGGAGTTCCTTCTAGGT
TTAGTGGCAGCCGGAGTGGCACCGACTTCACATTG
ACTATTAGCTCTTTGCAACCGGAGGATTTCGCTAC
CTACTACTGTCAACAATACTGGGCGTATTATTCGC
CCATCACATTCGGGCAAGG
CACAAAGGTCGAGATCAAGTAATAG
(SEQ ID NO: 1044)
Mature ANT39i HC knob LALAPS Merchant
S-S nucleotide sequence
GAAGTGCAGTTGGTGGAGTCTGGCGGTGGCTTGGT
CCAACCGGGTGGCAGCCTGAGGCTGAGCTGTGCCG
CAAGTGGCTTCACACTAAGTTCTTACTCCATGCAT
TGGGTTAGGCAAGCTCCTGGCAAGGGTCTGGAATG
GGTAGCCTACATCTCTTCCTATGATTCAATTACTG
ACTACGCGGACAGTGTCAAGGGGAGATTCACGATA
AGTGCCGACACCTCCAAGAACACAGCTTACTTGCA
AATGAATAGCCTGCGAGCTGAGGACACAGCTGTTT
ACTACTGTGCTAGGCCAGCCGTTGGGCACATGGCC
TTTGATTATTGGGGCCAGGGCACCCTGGTGACAGT
TAGTTCTGCTAGCACCAAGGGCCCATCGGTCTTCC
CCCTGGCACCCTCCTCCAAGAGCACCTCTGGGGGC
ACAGCGGCCCTGGGCTGCCTGGTCAAGGACTACTT
CCCCGAACCGGTGACGGTGTCGTGGAACTCAGGCG
CCCTGACCAGCGGCGTGCACACCTTCCCGGCCGTC
CTACAGTCCTCAGGACTCTACTCCCTCAGCAGCGT
GGTGACCGTGCCCTCCAGCAGCTTGGGCACCCAGA
CCTACATCTGCAACGTGAATCACAAGCCCAGCAAC
ACCAAGGTGGACAAGAAGGTTGAGCCCAAATCTTG
TGACAAAACTCACACATGCCCACCGTGCCCAGCAC
CTGAAGCCGCCGGGGGACCGTCAGTCTTCCTCTTC
CCCCCAAAACCCAAGGACACCCTCATGATCTCCCG
GACCCCTGAGGTCACATGCGTGGTGGTGGACGTGA
GCCACGAAGACCCTGAGGTCAAGTTCAACTGGTAC
GTGGACGGCGTGGAGGTGCATAATGCCAAGACAAA
GCCGCGGGAGGAGCAGTACAACAGCACGTACCGTG
TGGTCAGCGTCCTCACCGTCCTGCACCAGGACTGG
CTGAATGGCAAGGAGTACAAGTGCAAGGTCTCCAA
CAAAGCCCTCCCAGCCTCCATCGAGAAAACCATCT
CCAAAGCCAAAGGGCAGCCCCGAGAACCACAGGTG
TACACCCTGCCCCCATGCCGGGAGGAGATGACCAA
GAACCAGGTCAGCCTGTGGTGCCTGGTCAAAGGCT
TCTATCCCAGCGACATCGCCGTGGAGTGGGAGAGC
AATGGGCAGCCGGAGAACAACTACAAGACCACGCC
TCCCGTGCTGGACTCCGACGGCTCCTTCTTCCTCT
ACAGCAAGCTCACCGTGGACAAGAGCAGGTGGCAG
CAGGGGAACGTCTTCTCATGCTCCGTGATGCATGA
GGCTCTGCACAACCACTACACGCAGAAGAGCCTCT
CCCTGTCTCCGGGCAAAGGTGGAGGCTCCGGCGGT
GGCTCTGGCGGCGGTTCTGGCGGTGGTTCTGGTAG
CACGGGCGAAGTCCAATTGGTGGAGAGTGGTGGCG
GACTAGTGCAACCCGGCGGCTCCTTGCGACTCAGC
TGCGCTGCTAGCGGTTTTGACTTTACTGCCTACGC
CATGCACTGGGTTAGGCAGGCTCCCGGCAAGGGCC
TGGAATGGGTTGCCTCTATCTATCCTAGTGGCGGC
TATACCGCCTATGCCGACTCTGTCAAGGGCCGATT
CACCATTAGTGCTGACACTTCCAAGAACACAGCTT
ATCTGCAAATGAACAGTTTACGTGCTGAGGACACC
GCCGTGTACTATTGCGCGAGGCGCAGTTACTATTT
CGCCCTGGATTACTGGGGCCAGGGCACACTGGTGA
CAGTGTCTAGCGGAGGTGGTGGCAGCGATATTCAG
ATGACACAGAGCCCCAGTTCCCTGTCCGCATCCGT
TGGAGACCGCGTCACCATCACCTGCCGGGCCAGTC
AGTCTGTCTCAAGTGCTGTTGCATGGTACCAACAA
AAGCCTGGCAAAGCACCTAAGCTCCTGATCTATTC
CGCCTCTTCCCTGTACTCTGGAGTTCCTTCTAGGT
TTAGTGGCAGCCGGAGTGGCACCGACTTCACATTG
ACTATTAGCTCTTTGCAACCGGAGGATTTCGCTAC
CTACTACTGTCAACAATACTGGGCGTATTATTCGC
CCATCACATTCGGGCAAGG
CACAAAGGTCGAGATCAAGTAATAG
(SEQ ID NO: 1045)
ANT39 HC hole DANG nucleotide sequence
ATGGGATGGTCATGTATCATCCTTTTTCTGGTAGC
AACTGCAACTGGAGTACATAGCGAGGTGCAGCTGG
TCGAGTCCGGTGGTGGCCTAGTACAACCCGGCGGC
TCTCTCCGGCTGTCCTGCGCTGCCTCCGGATTTGA
CTTCTCCTCAAGTTCCATTCACTGGGTCAGGCAGG
CTCCTGGCAAAGGACTGGAATGGGTTGCCAGTATC
TCCTCCTCTTACGGCTACACCTACTACGCGGACTC
AGTTAAGGGGAGATTCACCATCTCCGCGGATACCA
GCAAGAATACTGCTTACCTGCAAATGAATAGTTTG
CGGGCCGAGGATACTGCTGTGTATTATTGCGCCCG
GAGTTGGGCTATGGACTACTGGGGCCAGGGGACTC
TCGTGACCGTGTCTTCCGGCGGCGGTGGATCTGAC
ATCCAGATGACACAGTCTCCAAGCTCATTGTCTGC
CTCTGTTGGAGACCGAGTGACAATCACATGCCGGG
CCAGCCAGTCTGTGTCTTCTGCCGTGGCTTGGTAC
CAACAAAAACCTGGCAAGGCTCCCAAATTGCTCAT
CTATTCCGCATCCGACTTATACTCTGGCGTCCCTT
CTCGCTTCTCTGGGAGCAGATCCGGAACCGATTTT
ACATTGACCATCTCTAGTCTGCAACCTGAGGACTT
CGCCACCTACTATTGCCAACAATATGCCGGCGCTG
GACTCATTACTTTTGGACAAGGTACCAAAGTGGAG
ATCAAGGGTGGCGGTGGAAGTGGTGGAGGAGGTAG
TGAGCCCAAATCTTCCGACAAAACTCACACATGCC
CACCGTGCCCAGCACCTGAACTCCTGGGGGGACCG
TCAGTCTTCCTCTTCCCCCCAAAACCCAAGGACAC
CCTCATGATCTCCCGGACCCCTGAGGTCACATGCG
TGGTGGTGGCCGTGAGCCACGAAGACCCTGAGGTC
AAGTTCAACTGGTACGTGGACGGCGTGGAGGTGCA
TAATGCCAAGACAAAGCCGCGGGAGGAGCAGTACG
GCAGCACGTACCGTGTGGTCAGCGTCCTCACCGTC
CTGCACCAGGACTGGCTGAATGGCAAGGAGTACAA
GTGCAAGGTCTCCAACAAAGCCCTCCCAGCCCCCA
TCGAGAAAACCATCTCCAAAGCCAAAGGGCAGCCC
CGAGAACCACAGGTGTACACCCTGCCCCCAATCCG
GGAGCTGATGACCTCCAACCAGGTCAGCCTGAGCT
GCGCCGTCAAAGGCTTCTATCCCAGCGACATCGCC
GTGGAGTGGGAGAGCAATGGGCAGCCGGAGAACAA
CTACAAGACCACGCCTCCCGTGCTGGACTCCGACG
GCTCCTTCTTCCTCGTGAGCAAGCTCACCGTGGAC
AAGAGCAGGTGGCAGCAGGGGAACGTCTTCTCATG
CTCCGTGATGCATGAGGCTCTGCACAACCACTACA
CGCAGAAGAGCCTCTCCCTGTCTCCGGGCAAAGGC
GGAGGAAGCGGCGGAGGCAGCGGAGGCGGTAGCGG
CGGCGGATCAGGAAGTACAGGGGAGGTACAGCTGG
TGGAGAGCGGAGGGGGGCTAGTGCAACCTGGGGGC
AGTCTGCGACTGTCATGTGCTGCAAGCGGGTTTAC
CCTGTCTTCATATAGCATGCACTGGGTCCGACAAG
CTCCCGGCAAGGGCTTGGAATGGGTCGCATACATT
TCAAGTTACGACTCAATCACTGACTATGCCGATTC
CGTGAAGGGCCGGTTCACCATTTCCGCGGACACCT
CCAAAAACACAGCATATCTTCAAATGAACAGTCTA
AGGGCGGAAGATACCGCTGTTTACTATTGTGCACG
ACCCGCGGTTGGTCATATGGCTTTTGACTACTGGG
GCCAGGGCACCCTAGTGACAGTCTCTTCCGCTTCC
ACTAAGGGGCCCTCTGTCTTTCCTCTGGCACCATC
CTCCAAATCAACGTCAGGTGGCACAGCCGCCCTCG
GCTGTCTGGTTAAGGACTACTTTCCCGAACCCGTT
ACCGTTTCTTGGAACTCTGGCGCCCTCACATCCGG
AGTCCACACATTTCCTGCTGTCCTACAATCTTCTG
GACTGTACTCCTTGAGCTCCGTAGTTACGGTGCCC
TCATCTAGCCTGGGTACTCAGACTTACATTTGTAA
CGTGAACCACAAGCCCAGCAACACAAAAGTGGACA
AGAAGGTTGAGCCCAAGTCCTGTGACAAAACCCAC
ACAT
AATAG (SEQ ID NO: 1046)
ANT39 HC hole LAL APS nucleotide
sequence
ATGGGATGGTCATGTATCATCCTTTTTCTGGTAGC
AACTGCAACTGGAGTACATAGCGAGGTGCAGCTGG
TCGAGTCCGGTGGTGGCCTAGTACAACCCGGCGGC
TCTCTCCGGCTGTCCTGCGCTGCCTCCGGATTTGA
CTTCTCCTCAAGTTCCATTCACTGGGTCAGGCAGG
CTCCTGGCAAAGGACTGGAATGGGTTGCCAGTATC
TCCTCCTCTTACGGCTACACCTACTACGCGGACTC
AGTTAAGGGGAGATTCACCATCTCCGCGGATACCA
GCAAGAATACTGCTTACCTGCAAATGAATAGTTTG
CGGGCCGAGGATACTGCTGTGTATTATTGCGCCCG
GAGTTGGGCTATGGACTACTGGGGCCAGGGGACTC
TCGTGACCGTGTCTTCCGGCGGCGGTGGATCTGAC
ATCCAGATGACACAGTCTCCAAGCTCATTGTCTGC
CTCTGTTGGAGACCGAGTGACAATCACATGCCGGG
CCAGCCAGTCTGTGTCTTCTGCCGTGGCTTGGTAC
CAACAAAAACCTGGCAAGGCTCCCAAATTGCTCAT
CTATTCCGCATCCGACTTATACTCTGGCGTCCCTT
CTCGCTTCTCTGGGAGCAGATCCGGAACCGATTTT
ACATTGACCATCTCTAGTCTGCAACCTGAGGACTT
CGCCACCTACTATTGCCAACAATATGCCGGCGCTG
GACTCATTACTTTTGGACAAGGTACCAAAGTGGAG
ATCAAGGGTGGCGGTGGAAGTGGTGGAGGAGGTAG
TGAGCCCAAATCTTCCGACAAAACTCACACATGCC
CACCGTGCCCAGCACCTGAAGCCGCCGGGGGACCG
TCAGTCTTCCTCTTCCCCCCAAAACCCAAGGACAC
CCTCATGATCTCCCGGACCCCTGAGGTCACATGCG
TGGTGGTGGACGTGAGCCACGAAGACCCTGAGGTC
AAGTTCAACTGGTACGTGGACGGCGTGGAGGTGCA
TAATGCCAAGACAAAGCCGCGGGAGGAGCAGTACA
ACAGCACGTACCGTGTGGTCAGCGTCCTCACCGTC
CTGCACCAGGACTGGCTGAATGGCAAGGAGTACAA
GTGCAAGGTCTCCAACAAAGCCCTCCCAGCCTCCA
TCGAGAAAACCATCTCCAAAGCCAAAGGGCAGCCC
CGAGAACCACAGGTGTACACCCTGCCCCCAATCCG
GGAGCTGATGACCTCCAACCAGGTCAGCCTGAGCT
GCGCCGTCAAAGGCTTCTATCCCAGCGACATCGCC
GTGGAGTGGGAGAGCAATGGGCAGCCGGAGAACAA
CTACAAGACCACGCCTCCCGTGCTGGACTCCGACG
GCTCCTTCTTCCTCGTGAGCAAGCTCACCGTGGAC
AAGAGCAGGTGGCAGCAGGGGAACGTCTTCTCATG
CTCCGTGATGCATGAGGCTCTGCACAACCACTACA
CGCAGAAGAGCCTCTCCCTGTCTCCGGGCAAAGGC
GGAGGAAGCGGCGGAGGCAGCGGAGGCGGTAGCGG
CGGCGGATCAGGAAGTACAGGGGAGGTACAGCTGG
TGGAGAGCGGAGGGGGGCTAGTGCAACCTGGGGGC
AGTCTGCGACTGTCATGTGCTGCAAGCGGGTTTAC
CCTGTCTTCATATAGCATGCACTGGGTCCGACAAG
CTCCCGGCAAGGGCTTGGAATGGGTCGCATACATT
TCAAGTTACGACTCAATCACTGACTATGCCGATTC
CGTGAAGGGCCGGTTCACCATTTCCGCGGACACCT
CCAAAAACACAGCATATCTTCAAATGAACAGTCTA
AGGGCGGAAGATACCGCTGTTTACTATTGTGCACG
ACCCGCGGTTGGTCATATGGCTTTTGACTACTGGG
GCCAGGGCACCCTAGTGACAGTCTCTTCCGCTTCC
ACTAAGGGGCCCTCTGTCTTTCCTCTGGCACCATC
CTCCAAATCAACGTCAGGTGGCACAGCCGCCCTCG
GCTGTCTGGTTAAGGACTACTTTCCCGAACCCGTT
ACCGTTTCTTGGAACTCTGGCGCCCTCACATCCGG
AGTCCACACATTTCCTGCTGTCCTACAATCTTCTG
GACTGTACTCCTTGAGCTCCGTAGTTACGGTGCCC
TCATCTAGCCTGGGTACTCAGACTTACATTTGTAA
CGTGAACCACAAGCCCAGCAACACAAAAGTGGACA
AGAAGGTTGAGCCCAAGTCCTGTGACAAAACCCAC
ACAT
AATAG (SEQ ID NO: 1047)
ANT39 HC hole LAL APS Merchant
nucleotide sequence
ATGGGATGGTCATGTATCATCCTTTTTCTGGTAGC
AACTGCAACTGGAGTACATAGCGAGGTGCAGCTGG
TCGAGTCCGGTGGTGGCCTAGTACAACCCGGCGGC
TCTCTCCGGCTGTCCTGCGCTGCCTCCGGATTTGA
CTTCTCCTCAAGTTCCATTCACTGGGTCAGGCAGG
CTCCTGGCAAAGGACTGGAATGGGTTGCCAGTATC
TCCTCCTCTTACGGCTACACCTACTACGCGGACTC
AGTTAAGGGGAGATTCACCATCTCCGCGGATACCA
GCAAGAATACTGCTTACCTGCAAATGAATAGTTTG
CGGGCCGAGGATACTGCTGTGTATTATTGCGCCCG
GAGTTGGGCTATGGACTACTGGGGCCAGGGGACTC
TCGTGACCGTGTCTTCCGGCGGCGGTGGATCTGAC
ATCCAGATGACACAGTCTCCAAGCTCATTGTCTGC
CTCTGTTGGAGACCGAGTGACAATCACATGCCGGG
CCAGCCAGTCTGTGTCTTCTGCCGTGGCTTGGTAC
CAACAAAAACCTGGCAAGGCTCCCAAATTGCTCAT
CTATTCCGCATCCGACTTATACTCTGGCGTCCCTT
CTCGCTTCTCTGGGAGCAGATCCGGAACCGATTTT
ACATTGACCATCTCTAGTCTGCAACCTGAGGACTT
CGCCACCTACTATTGCCAACAATATGCCGGCGCTG
GACTCATTACTTTTGGACAAGGTACCAAAGTGGAG
ATCAAGGGTGGCGGTGGAAGTGGTGGAGGAGGTAG
TGAGCCCAAATCTTCCGACAAAACTCACACATGCC
CACCGTGCCCAGCACCTGAAGCCGCCGGGGGACCG
TCAGTCTTCCTCTTCCCCCCAAAACCCAAGGACAC
CCTCATGATCTCCCGGACCCCTGAGGTCACATGCG
TGGTGGTGGACGTGAGCCACGAAGACCCTGAGGTC
AAGTTCAACTGGTACGTGGACGGCGTGGAGGTGCA
TAATGCCAAGACAAAGCCGCGGGAGGAGCAGTACA
ACAGCACGTACCGTGTGGTCAGCGTCCTCACCGTC
CTGCACCAGGACTGGCTGAATGGCAAGGAGTACAA
GTGCAAGGTCTCCAACAAAGCCCTCCCAGCCTCCA
TCGAGAAAACCATCTCCAAAGCCAAAGGGCAGCCC
CGAGAACCACAGGTGTACACCCTGCCCCCATCCCG
GGAGGAGATGACCAAGAACCAGGTCAGCCTGAGCT
GCGCCGTCAAAGGCTTCTATCCCAGCGACATCGCC
GTGGAGTGGGAGAGCAATGGGCAGCCGGAGAACAA
CTACAAGACCACGCCTCCCGTGCTGGACTCCGACG
GCTCCTTCTTCCTCGTGAGCAAGCTCACCGTGGAC
AAGAGCAGGTGGCAGCAGGGGAACGTCTTCTCATG
CTCCGTGATGCATGAGGCTCTGCACAACCACTACA
CGCAGAAGAGCCTCTCCCTGTCTCCGGGCAAAGGC
GGAGGAAGCGGCGGAGGCAGCGGAGGCGGTAGCGG
CGGCGGATCAGGAAGTACAGGGGAGGTACAGCTGG
TGGAGAGCGGAGGGGGGCTAGTGCAACCTGGGGGC
AGTCTGCGACTGTCATGTGCTGCAAGCGGGTTTAC
CCTGTCTTCATATAGCATGCACTGGGTCCGACAAG
CTCCCGGCAAGGGCTTGGAATGGGTCGCATACATT
TCAAGTTACGACTCAATCACTGACTATGCCGATTC
CGTGAAGGGCCGGTTCACCATTTCCGCGGACACCT
CCAAAAACACAGCATATCTTCAAATGAACAGTCTA
AGGGCGGAAGATACCGCTGTTTACTATTGTGCACG
ACCCGCGGTTGGTCATATGGCTTTTGACTACTGGG
GCCAGGGCACCCTAGTGACAGTCTCTTCCGCTTCC
ACTAAGGGGCCCTCTGTCTTTCCTCTGGCACCATC
CTCCAAATCAACGTCAGGTGGCACAGCCGCCCTCG
GCTGTCTGGTTAAGGACTACTTTCCCGAACCCGTT
ACCGTTTCTTGGAACTCTGGCGCCCTCACATCCGG
AGTCCACACATTTCCTGCTGTCCTACAATCTTCTG
GACTGTACTCCTTGAGCTCCGTAGTTACGGTGCCC
TCATCTAGCCTGGGTACTCAGACTTACATTTGTAA
CGTGAACCACAAGCCCAGCAACACAAAAGTGGACA
AGAAGGTTGAGCCCAAGTCCTGTGACAAAACCCAC
ACA
TAATAG (SEQ ID NO: 1048)
ANT39 HC hole LALAPS Merchant S-S
nucleotide sequence
ATGGGATGGTCATGTATCATCCTTTTTCTGGTAGC
AACTGCAACTGGAGTACATAGCGAGGTGCAGCTGG
TCGAGTCCGGTGGTGGCCTAGTACAACCCGGCGGC
TCTCTCCGGCTGTCCTGCGCTGCCTCCGGATTTGA
CTTCTCCTCAAGTTCCATTCACTGGGTCAGGCAGG
CTCCTGGCAAAGGACTGGAATGGGTTGCCAGTATC
TCCTCCTCTTACGGCTACACCTACTACGCGGACTC
AGTTAAGGGGAGATTCACCATCTCCGCGGATACCA
GCAAGAATACTGCTTACCTGCAAATGAATAGTTTG
CGGGCCGAGGATACTGCTGTGTATTATTGCGCCCG
GAGTTGGGCTATGGACTACTGGGGCCAGGGGACTC
TCGTGACCGTGTCTTCCGGCGGCGGTGGATCTGAC
ATCCAGATGACACAGTCTCCAAGCTCATTGTCTGC
CTCTGTTGGAGACCGAGTGACAATCACATGCCGGG
CCAGCCAGTCTGTGTCTTCTGCCGTGGCTTGGTAC
CAACAAAAACCTGGCAAGGCTCCCAAATTGCTCAT
CTATTCCGCATCCGACTTATACTCTGGCGTCCCTT
CTCGCTTCTCTGGGAGCAGATCCGGAACCGATTTT
ACATTGACCATCTCTAGTCTGCAACCTGAGGACTT
CGCCACCTACTATTGCCAACAATATGCCGGCGCTG
GACTCATTACTTTTGGACAAGGTACCAAAGTGGAG
ATCAAGGGTGGCGGTGGAAGTGGTGGAGGAGGTAG
TGAGCCCAAATCTTCCGACAAAACTCACACATGCC
CACCGTGCCCAGCACCTGAAGCCGCCGGGGGACCG
TCAGTCTTCCTCTTCCCCCCAAAACCCAAGGACAC
CCTCATGATCTCCCGGACCCCTGAGGTCACATGCG
TGGTGGTGGACGTGAGCCACGAAGACCCTGAGGTC
AAGTTCAACTGGTACGTGGACGGCGTGGAGGTGCA
TAATGCCAAGACAAAGCCGCGGGAGGAGCAGTACA
ACAGCACGTACCGTGTGGTCAGCGTCCTCACCGTC
CTGCACCAGGACTGGCTGAATGGCAAGGAGTACAA
GTGCAAGGTCTCCAACAAAGCCCTCCCAGCCTCCA
TCGAGAAAACCATCTCCAAAGCCAAAGGGCAGCCC
CGAGAACCACAGGTGTGCACCCTGCCCCCATCCCG
GGAGGAGATGACCAAGAACCAGGTCAGCCTGAGCT
GCGCCGTCAAAGGCTTCTATCCCAGCGACATCGCC
GTGGAGTGGGAGAGCAATGGGCAGCCGGAGAACAA
CTACAAGACCACGCCTCCCGTGCTGGACTCCGACG
GCTCCTTCTTCCTCGTGAGCAAGCTCACCGTGGAC
AAGAGCAGGTGGCAGCAGGGGAACGTCTTCTCATG
CTCCGTGATGCATGAGGCTCTGCACAACCACTACA
CGCAGAAGAGCCTCTCCCTGTCTCCGGGCAAAGGC
GGAGGAAGCGGCGGAGGCAGCGGAGGCGGTAGCGG
CGGCGGATCAGGAAGTACAGGGGAGGTACAGCTGG
TGGAGAGCGGAGGGGGGCTAGTGCAACCTGGGGGC
AGTCTGCGACTGTCATGTGCTGCAAGCGGGTTTAC
CCTGTCTTCATATAGCATGCACTGGGTCCGACAAG
CTCCCGGCAAGGGCTTGGAATGGGTCGCATACATT
TCAAGTTACGACTCAATCACTGACTATGCCGATTC
CGTGAAGGGCCGGTTCACCATTTCCGCGGACACCT
CCAAAAACACAGCATATCTTCAAATGAACAGTCTA
AGGGCGGAAGATACCGCTGTTTACTATTGTGCACG
ACCCGCGGTTGGTCATATGGCTTTTGACTACTGGG
GCCAGGGCACCCTAGTGACAGTCTCTTCCGCTTCC
ACTAAGGGGCCCTCTGTCTTTCCTCTGGCACCATC
CTCCAAATCAACGTCAGGTGGCACAGCCGCCCTCG
GCTGTCTGGTTAAGGACTACTTTCCCGAACCCGTT
ACCGTTTCTTGGAACTCTGGCGCCCTCACATCCGG
AGTCCACACATTTCCTGCTGTCCTACAATCTTCTG
GACTGTACTCCTTGAGCTCCGTAGTTACGGTGCCC
TCATCTAGCCTGGGTACTCAGACTTACATTTGTAA
CGTGAACCACAAGCCCAGCAACACAAAAGTGGACA
AGAAGGTTGAGCCCAA
GTCCTGTGACAAAACCCACACATAATAG
(SEQ ID NO: 1049)
Mature ANT39 HC hole DANG
nucleotide sequence
GAGGTGCAGCTGGTCGAGTCCGGTGGTGGCCTAGT
ACAACCCGGCGGCTCTCTCCGGCTGTCCTGCGCTG
CCTCCGGATTTGACTTCTCCTCAAGTTCCATTCAC
TGGGTCAGGCAGGCTCCTGGCAAAGGACTGGAATG
GGTTGCCAGTATCTCCTCCTCTTACGGCTACACCT
ACTACGCGGACTCAGTTAAGGGGAGATTCACCATC
TCCGCGGATACCAGCAAGAATACTGCTTACCTGCA
AATGAATAGTTTGCGGGCCGAGGATACTGCTGTGT
ATTATTGCGCCCGGAGTTGGGCTATGGACTACTGG
GGCCAGGGGACTCTCGTGACCGTGTCTTCCGGCGG
CGGTGGATCTGACATCCAGATGACACAGTCTCCAA
GCTCATTGTCTGCCTCTGTTGGAGACCGAGTGACA
ATCACATGCCGGGCCAGCCAGTCTGTGTCTTCTGC
CGTGGCTTGGTACCAACAAAAACCTGGCAAGGCTC
CCAAATTGCTCATCTATTCCGCATCCGACTTATAC
TCTGGCGTCCCTTCTCGCTTCTCTGGGAGCAGATC
CGGAACCGATTTTACATTGACCATCTCTAGTCTGC
AACCTGAGGACTTCGCCACCTACTATTGCCAACAA
TATGCCGGCGCTGGACTCATTACTTTTGGACAAGG
TACCAAAGTGGAGATCAAGGGTGGCGGTGGAAGTG
GTGGAGGAGGTAGTGAGCCCAAATCTTCCGACAAA
ACTCACACATGCCCACCGTGCCCAGCACCTGAACT
CCTGGGGGGACCGTCAGTCTTCCTCTTCCCCCCAA
AACCCAAGGACACCCTCATGATCTCCCGGACCCCT
GAGGTCACATGCGTGGTGGTGGCCGTGAGCCACGA
AGACCCTGAGGTCAAGTTCAACTGGTACGTGGACG
GCGTGGAGGTGCATAATGCCAAGACAAAGCCGCGG
GAGGAGCAGTACGGCAGCACGTACCGTGTGGTCAG
CGTCCTCACCGTCCTGCACCAGGACTGGCTGAATG
GCAAGGAGTACAAGTGCAAGGTCTCCAACAAAGCC
CTCCCAGCCCCCATCGAGAAAACCATCTCCAAAGC
CAAAGGGCAGCCCCGAGAACCACAGGTGTACACCC
TGCCCCCAATCCGGGAGCTGATGACCTCCAACCAG
GTCAGCCTGAGCTGCGCCGTCAAAGGCTTCTATCC
CAGCGACATCGCCGTGGAGTGGGAGAGCAATGGGC
AGCCGGAGAACAACTACAAGACCACGCCTCCCGTG
CTGGACTCCGACGGCTCCTTCTTCCTCGTGAGCAA
GCTCACCGTGGACAAGAGCAGGTGGCAGCAGGGGA
ACGTCTTCTCATGCTCCGTGATGCATGAGGCTCTG
CACAACCACTACACGCAGAAGAGCCTCTCCCTGTC
TCCGGGCAAAGGCGGAGGAAGCGGCGGAGGCAGCG
GAGGCGGTAGCGGCGGCGGATCAGGAAGTACAGGG
GAGGTACAGCTGGTGGAGAGCGGAGGGGGGCTAGT
GCAACCTGGGGGCAGTCTGCGACTGTCATGTGCTG
CAAGCGGGTTTACCCTGTCTTCATATAGCATGCAC
TGGGTCCGACAAGCTCCCGGCAAGGGCTTGGAATG
GGTCGCATACATTTCAAGTTACGACTCAATCACTG
ACTATGCCGATTCCGTGAAGGGCCGGTTCACCATT
TCCGCGGACACCTCCAAAAACACAGCATATCTTCA
AATGAACAGTCTAAGGGCGGAAGATACCGCTGTTT
ACTATTGTGCACGACCCGCGGTTGGTCATATGGCT
TTTGACTACTGGGGCCAGGGCACCCTAGTGACAGT
CTCTTCCGCTTCCACTAAGGGGCCCTCTGTCTTTC
CTCTGGCACCATCCTCCAAATCAACGTCAGGTGGC
ACAGCCGCCCTCGGCTGTCTGGTTAAGGACTACTT
TCCCGAACCCGTTACCGTTTCTTGGAACTCTGGCG
CCCTCACATCCGGAGTCCACACATTTCCTGCTGTC
CTACAATCTTCTGGACTGTACTCCTTGAGCTCCGT
AGTTACGGTGCCCTCATCTAGCCTGGGTACTCAGA
CTTACATTTGTAACGTGAACCACAAGCCCAGCAAC
ACAAAAGTGGACAAGAAGGTTGAGCCCAAGTCCTG
TGACAAAACCC
ACACATAATAG (SEQ ID NO: 1050)
Mature ANT39 HC hole LALAPS
nucleotide sequence
GAGGTGCAGCTGGTCGAGTCCGGTGGTGGCCTAGT
ACAACCCGGCGGCTCTCTCCGGCTGTCCTGCGCTG
CCTCCGGATTTGACTTCTCCTCAAGTTCCATTCAC
TGGGTCAGGCAGGCTCCTGGCAAAGGACTGGAATG
GGTTGCCAGTATCTCCTCCTCTTACGGCTACACCT
ACTACGCGGACTCAGTTAAGGGGAGATTCACCATC
TCCGCGGATACCAGCAAGAATACTGCTTACCTGCA
AATGAATAGTTTGCGGGCCGAGGATACTGCTGTGT
ATTATTGCGCCCGGAGTTGGGCTATGGACTACTGG
GGCCAGGGGACTCTCGTGACCGTGTCTTCCGGCGG
CGGTGGATCTGACATCCAGATGACACAGTCTCCAA
GCTCATTGTCTGCCTCTGTTGGAGACCGAGTGACA
ATCACATGCCGGGCCAGCCAGTCTGTGTCTTCTGC
CGTGGCTTGGTACCAACAAAAACCTGGCAAGGCTC
CCAAATTGCTCATCTATTCCGCATCCGACTTATAC
TCTGGCGTCCCTTCTCGCTTCTCTGGGAGCAGATC
CGGAACCGATTTTACATTGACCATCTCTAGTCTGC
AACCTGAGGACTTCGCCACCTACTATTGCCAACAA
TATGCCGGCGCTGGACTCATTACTTTTGGACAAGG
TACCAAAGTGGAGATCAAGGGTGGCGGTGGAAGTG
GTGGAGGAGGTAGTGAGCCCAAATCTTCCGACAAA
ACTCACACATGCCCACCGTGCCCAGCACCTGAAGC
CGCCGGGGGACCGTCAGTCTTCCTCTTCCCCCCAA
AACCCAAGGACACCCTCATGATCTCCCGGACCCCT
GAGGTCACATGCGTGGTGGTGGACGTGAGCCACGA
AGACCCTGAGGTCAAGTTCAACTGGTACGTGGACG
GCGTGGAGGTGCATAATGCCAAGACAAAGCCGCGG
GAGGAGCAGTACAACAGCACGTACCGTGTGGTCAG
CGTCCTCACCGTCCTGCACCAGGACTGGCTGAATG
GCAAGGAGTACAAGTGCAAGGTCTCCAACAAAGCC
CTCCCAGCCTCCATCGAGAAAACCATCTCCAAAGC
CAAAGGGCAGCCCCGAGAACCACAGGTGTACACCC
TGCCCCCAATCCGGGAGCTGATGACCTCCAACCAG
GTCAGCCTGAGCTGCGCCGTCAAAGGCTTCTATCC
CAGCGACATCGCCGTGGAGTGGGAGAGCAATGGGC
AGCCGGAGAACAACTACAAGACCACGCCTCCCGTG
CTGGACTCCGACGGCTCCTTCTTCCTCGTGAGCAA
GCTCACCGTGGACAAGAGCAGGTGGCAGCAGGGGA
ACGTCTTCTCATGCTCCGTGATGCATGAGGCTCTG
CACAACCACTACACGCAGAAGAGCCTCTCCCTGTC
TCCGGGCAAAGGCGGAGGAAGCGGCGGAGGCAGCG
GAGGCGGTAGCGGCGGCGGATCAGGAAGTACAGGG
GAGGTACAGCTGGTGGAGAGCGGAGGGGGGCTAGT
GCAACCTGGGGGCAGTCTGCGACTGTCATGTGCTG
CAAGCGGGTTTACCCTGTCTTCATATAGCATGCAC
TGGGTCCGACAAGCTCCCGGCAAGGGCTTGGAATG
GGTCGCATACATTTCAAGTTACGACTCAATCACTG
ACTATGCCGATTCCGTGAAGGGCCGGTTCACCATT
TCCGCGGACACCTCCAAAAACACAGCATATCTTCA
AATGAACAGTCTAAGGGCGGAAGATACCGCTGTTT
ACTATTGTGCACGACCCGCGGTTGGTCATATGGCT
TTTGACTACTGGGGCCAGGGCACCCTAGTGACAGT
CTCTTCCGCTTCCACTAAGGGGCCCTCTGTCTTTC
CTCTGGCACCATCCTCCAAATCAACGTCAGGTGGC
ACAGCCGCCCTCGGCTGTCTGGTTAAGGACTACTT
TCCCGAACCCGTTACCGTTTCTTGGAACTCTGGCG
CCCTCACATCCGGAGTCCACACATTTCCTGCTGTC
CTACAATCTTCTGGACTGTACTCCTTGAGCTCCGT
AGTTACGGTGCCCTCATCTAGCCTGGGTACTCAGA
CTTACATTTGTAACGTGAACCACAAGCCCAGCAAC
ACAAAAGTGGACAAGAAGGTTGAGCCCAAGTCCTG
TGACAAAACCC
ACACATAATAG (SEQ ID NO: 1051)
Mature ANT39 HC hole LALAPS Merchant
nucleotide sequence
GAGGTGCAGCTGGTCGAGTCCGGTGGTGGCCTAGT
ACAACCCGGCGGCTCTCTCCGGCTGTCCTGCGCTG
CCTCCGGATTTGACTTCTCCTCAAGTTCCATTCAC
TGGGTCAGGCAGGCTCCTGGCAAAGGACTGGAATG
GGTTGCCAGTATCTCCTCCTCTTACGGCTACACCT
ACTACGCGGACTCAGTTAAGGGGAGATTCACCATC
TCCGCGGATACCAGCAAGAATACTGCTTACCTGCA
AATGAATAGTTTGCGGGCCGAGGATACTGCTGTGT
ATTATTGCGCCCGGAGTTGGGCTATGGACTACTGG
GGCCAGGGGACTCTCGTGACCGTGTCTTCCGGCGG
CGGTGGATCTGACATCCAGATGACACAGTCTCCAA
GCTCATTGTCTGCCTCTGTTGGAGACCGAGTGACA
ATCACATGCCGGGCCAGCCAGTCTGTGTCTTCTGC
CGTGGCTTGGTACCAACAAAAACCTGGCAAGGCTC
CCAAATTGCTCATCTATTCCGCATCCGACTTATAC
TCTGGCGTCCCTTCTCGCTTCTCTGGGAGCAGATC
CGGAACCGATTTTACATTGACCATCTCTAGTCTGC
AACCTGAGGACTTCGCCACCTACTATTGCCAACAA
TATGCCGGCGCTGGACTCATTACTTTTGGACAAGG
TACCAAAGTGGAGATCAAGGGTGGCGGTGGAAGTG
GTGGAGGAGGTAGTGAGCCCAAATCTTCCGACAAA
ACTCACACATGCCCACCGTGCCCAGCACCTGAAGC
CGCCGGGGGACCGTCAGTCTTCCTCTTCCCCCCAA
AACCCAAGGACACCCTCATGATCTCCCGGACCCCT
GAGGTCACATGCGTGGTGGTGGACGTGAGCCACGA
AGACCCTGAGGTCAAGTTCAACTGGTACGTGGACG
GCGTGGAGGTGCATAATGCCAAGACAAAGCCGCGG
GAGGAGCAGTACAACAGCACGTACCGTGTGGTCAG
CGTCCTCACCGTCCTGCACCAGGACTGGCTGAATG
GCAAGGAGTACAAGTGCAAGGTCTCCAACAAAGCC
CTCCCAGCCTCCATCGAGAAAACCATCTCCAAAGC
CAAAGGGCAGCCCCGAGAACCACAGGTGTACACCC
TGCCCCCATCCCGGGAGGAGATGACCAAGAACCAG
GTCAGCCTGAGCTGCGCCGTCAAAGGCTTCTATCC
CAGCGACATCGCCGTGGAGTGGGAGAGCAATGGGC
AGCCGGAGAACAACTACAAGACCACGCCTCCCGTG
CTGGACTCCGACGGCTCCTTCTTCCTCGTGAGCAA
GCTCACCGTGGACAAGAGCAGGTGGCAGCAGGGGA
ACGTCTTCTCATGCTCCGTGATGCATGAGGCTCTG
CACAACCACTACACGCAGAAGAGCCTCTCCCTGTC
TCCGGGCAAAGGCGGAGGAAGCGGCGGAGGCAGCG
GAGGCGGTAGCGGCGGCGGATCAGGAAGTACAGGG
GAGGTACAGCTGGTGGAGAGCGGAGGGGGGCTAGT
GCAACCTGGGGGCAGTCTGCGACTGTCATGTGCTG
CAAGCGGGTTTACCCTGTCTTCATATAGCATGCAC
TGGGTCCGACAAGCTCCCGGCAAGGGCTTGGAATG
GGTCGCATACATTTCAAGTTACGACTCAATCACTG
ACTATGCCGATTCCGTGAAGGGCCGGTTCACCATT
TCCGCGGACACCTCCAAAAACACAGCATATCTTCA
AATGAACAGTCTAAGGGCGGAAGATACCGCTGTTT
ACTATTGTGCACGACCCGCGGTTGGTCATATGGCT
TTTGACTACTGGGGCCAGGGCACCCTAGTGACAGT
CTCTTCCGCTTCCACTAAGGGGCCCTCTGTCTTTC
CTCTGGCACCATCCTCCAAATCAACGTCAGGTGGC
ACAGCCGCCCTCGGCTGTCTGGTTAAGGACTACTT
TCCCGAACCCGTTACCGTTTCTTGGAACTCTGGCG
CCCTCACATCCGGAGTCCACACATTTCCTGCTGTC
CTACAATCTTCTGGACTGTACTCCTTGAGCTCCGT
AGTTACGGTGCCCTCATCTAGCCTGGGTACTCAGA
CTTACATTTGTAACGTGAACCACAAGCCCAGCAAC
ACAAAAGTGGACAAGAAGGTTGAGCCCAAGTCCTG
TGACAAAACCC
ACACATAATAG (SEQ ID NO: 1052)
Mature ANT39 HC hole LALAPS Merchant S-S
nucleotide sequence
GAGGTGCAGCTGGTCGAGTCCGGTGGTGGCCTAGT
ACAACCCGGCGGCTCTCTCCGGCTGTCCTGCGCTG
CCTCCGGATTTGACTTCTCCTCAAGTTCCATTCAC
TGGGTCAGGCAGGCTCCTGGCAAAGGACTGGAATG
GGTTGCCAGTATCTCCTCCTCTTACGGCTACACCT
ACTACGCGGACTCAGTTAAGGGGAGATTCACCATC
TCCGCGGATACCAGCAAGAATACTGCTTACCTGCA
AATGAATAGTTTGCGGGCCGAGGATACTGCTGTGT
ATTATTGCGCCCGGAGTTGGGCTATGGACTACTGG
GGCCAGGGGACTCTCGTGACCGTGTCTTCCGGCGG
CGGTGGATCTGACATCCAGATGACACAGTCTCCAA
GCTCATTGTCTGCCTCTGTTGGAGACCGAGTGACA
ATCACATGCCGGGCCAGCCAGTCTGTGTCTTCTGC
CGTGGCTTGGTACCAACAAAAACCTGGCAAGGCTC
CCAAATTGCTCATCTATTCCGCATCCGACTTATAC
TCTGGCGTCCCTTCTCGCTTCTCTGGGAGCAGATC
CGGAACCGATTTTACATTGACCATCTCTAGTCTGC
AACCTGAGGACTTCGCCACCTACTATTGCCAACAA
TATGCCGGCGCTGGACTCATTACTTTTGGACAAGG
TACCAAAGTGGAGATCAAGGGTGGCGGTGGAAGTG
GTGGAGGAGGTAGTGAGCCCAAATCTTCCGACAAA
ACTCACACATGCCCACCGTGCCCAGCACCTGAAGC
CGCCGGGGGACCGTCAGTCTTCCTCTTCCCCCCAA
AACCCAAGGACACCCTCATGATCTCCCGGACCCCT
GAGGTCACATGCGTGGTGGTGGACGTGAGCCACGA
AGACCCTGAGGTCAAGTTCAACTGGTACGTGGACG
GCGTGGAGGTGCATAATGCCAAGACAAAGCCGCGG
GAGGAGCAGTACAACAGCACGTACCGTGTGGTCAG
CGTCCTCACCGTCCTGCACCAGGACTGGCTGAATG
GCAAGGAGTACAAGTGCAAGGTCTCCAACAAAGCC
CTCCCAGCCTCCATCGAGAAAACCATCTCCAAAGC
CAAAGGGCAGCCCCGAGAACCACAGGTGTGCACCC
TGCCCCCATCCCGGGAGGAGATGACCAAGAACCAG
GTCAGCCTGAGCTGCGCCGTCAAAGGCTTCTATCC
CAGCGACATCGCCGTGGAGTGGGAGAGCAATGGGC
AGCCGGAGAACAACTACAAGACCACGCCTCCCGTG
CTGGACTCCGACGGCTCCTTCTTCCTCGTGAGCAA
GCTCACCGTGGACAAGAGCAGGTGGCAGCAGGGGA
ACGTCTTCTCATGCTCCGTGATGCATGAGGCTCTG
CACAACCACTACACGCAGAAGAGCCTCTCCCTGTC
TCCGGGCAAAGGCGGAGGAAGCGGCGGAGGCAGCG
GAGGCGGTAGCGGCGGCGGATCAGGAAGTACAGGG
GAGGTACAGCTGGTGGAGAGCGGAGGGGGGCTAGT
GCAACCTGGGGGCAGTCTGCGACTGTCATGTGCTG
CAAGCGGGTTTACCCTGTCTTCATATAGCATGCAC
TGGGTCCGACAAGCTCCCGGCAAGGGCTTGGAATG
GGTCGCATACATTTCAAGTTACGACTCAATCACTG
ACTATGCCGATTCCGTGAAGGGCCGGTTCACCATT
TCCGCGGACACCTCCAAAAACACAGCATATCTTCA
AATGAACAGTCTAAGGGCGGAAGATACCGCTGTTT
ACTATTGTGCACGACCCGCGGTTGGTCATATGGCT
TTTGACTACTGGGGCCAGGGCACCCTAGTGACAGT
CTCTTCCGCTTCCACTAAGGGGCCCTCTGTCTTTC
CTCTGGCACCATCCTCCAAATCAACGTCAGGTGGC
ACAGCCGCCCTCGGCTGTCTGGTTAAGGACTACTT
TCCCGAACCCGTTACCGTTTCTTGGAACTCTGGCG
CCCTCACATCCGGAGTCCACACATTTCCTGCTGTC
CTACAATCTTCTGGACTGTACTCCTTGAGCTCCGT
AGTTACGGTGCCCTCATCTAGCCTGGGTACTCAGA
CTTACATTTGTAACGTGAACCACAAGCCCAGCAAC
ACAAAAGTGGACAAGAAGGTTGAGCCCAAGTCCTG
TGACAAAACCCACACATAATAG
(SEQ ID NO: 1053)
ANT39 HC knob DANG
nucleotide sequence
ATGGGATGGTCATGTATCATCCTTTTTCTGGTAGC
AACTGCAACTGGAGTACATAGCGAGGTCCAGCTCG
TTGAGTCTGGAGGCGGACTAGTTCAACCTGGCGGT
TCTCTGCGCCTGTCCTGTGCCGCCTCTGGCTTTGA
CTTCACCGCATATGCCATGCACTGGGTTAGGCAGG
CCCCAGGCAAGGGGCTGGAATGGGTTGCCTCTATA
TACCCTTCCGGAGGATACACAGCCTACGCTGATAG
TGTCAAAGGCCGGTTCACCATTAGCGCTGATACCT
CCAAGAATACTGCCTACTTGCAAATGAACAGCTTA
AGGGCTGAGGATACAGCAGTCTATTACTGTGCACG
GCGATCTTACTACTTTGCTCTGGATTACTGGGGCC
AAGGCACCCTGGTCACTGTTAGTTCTGGCGGTGGT
GGCTCAGACATCCAGATGACCCAGAGCCCCAGTAG
CCTATCGGCCTCGGTTGGCGATCGAGTGACCATTA
CCTGCCGGGCAAGCCAGAGTGTTTCAAGCGCAGTG
GCTTGGTATCAGCAAAAGCCTGGCAAAGCTCCAAA
ACTGCTTATCTACTCGGCGAGCTCCTTATATAGCG
GCGTGCCTAGTAGATTCAGCGGCTCCCGGTCTGGA
ACAGACTTTACCCTCACAATTAGCTCTCTCCAACC
TGAAGACTTCGCCACATATTATTGCCAACAATATT
GGGCCTACTATTCCCCTATCACCTTTGGTCAAGGA
ACCAAGGTGGAGATCAAGGGAGGAGGTGGTTCAGG
TGGTGGAGGAAGCGAGCCCAAATCTTCCGACAAAA
CTCACACATGCCCACCGTGCCCAGCACCTGAACTC
CTGGGGGGACCGTCAGTCTTCCTCTTCCCCCCAAA
ACCCAAGGACACCCTCATGATCTCCCGGACCCCTG
AGGTCACATGCGTGGTGGTGGCCGTGAGCCACGAA
GACCCTGAGGTCAAGTTCAACTGGTACGTGGACGG
CGTGGAGGTGCATAATGCCAAGACAAAGCCGCGGG
AGGAGCAGTACGGCAGCACGTACCGTGTGGTCAGC
GTCCTCACCGTCCTGCACCAGGACTGGCTGAATGG
CAAGGAGTACAAGTGCAAGGTCTCCAACAAAGCCC
TCCCAGCCCCCATCGAGAAAACCATCTCCAAAGCC
AAAGGGCAGCCCCGAGAACCAATGGTGTTCGACCT
GCCCCCATCCCGGGAGGAGATGACCAAGAACCAGG
TCAGCCTGTGGTGCATGGTCAAAGGCTTCTATCCC
AGCGACATCGCCGTGGAGTGGGAGAGCAATGGGCA
GCCGGAGAACAACTACAAGACCACGCCTCCCGTGC
TGGACTCCGACGGCTCCTTCTTCCTCTACAGCAAG
CTCACCGTGGACAAGAGCAGGTGGCAGCAGGGGAA
CGTCTTCTCATGCTCCGTGATGCATGAGGCTCTGC
ACAACCACTACACGCAGAAGAGCCTCTCCCTGTCT
CCGGGCAAAGGTGGTGGCTCTGGCGGCGGTAGCGG
GGGAGGATCTGGTGGCGGTTCTGGCTCAACCGGAG
AGGTCCAGCTTGTGGAGTCCGGCGGTGGACTGGTT
CAACCTGGCGGCTCACTCCGCCTGTCCTGTGCCGC
TTCCGGCTTCACCCTGAGTTCTTATTCAATGCATT
GGGTTAGGCAGGCACCTGGCAAAGGACTGGAATGG
GTGGCTTATATTTCATCCTATGACTCGATAACGGA
CTACGCCGATTCTGTGAAAGGTCGGTTCACCATCT
CTGCTGACACCTCCAAAAATACTGCTTACCTCCAA
ATGAACAGTCTGCGGGCTGAAGATACTGCCGTGTA
CTACTGTGCAAGACCTGCGGTTGGGCATATGGCTT
TTGACTACTGGGGTCAGGGGACACTGGTCACTGTC
TCCTCGGCGTCTACCAAAGGACCTAGCGTGTTCCC
CCTGGCTCCCTCATCCAAATCCACTAGCGGCGGTA
CCGCCGCCCTCGGCTGCCTCGTTAAGGATTACTTC
CCTGAACCAGTAACTGTTTCTTGGAATAGCGGTGC
ACTCACCTCTGGCGTGCACACCTTCCCTGCCGTCC
TGCAATCCTCCGGGCTGTATAGTCTCTCTTCTGTC
GTGACTGTGCCCTCTTCTTCCCTTGGCACCCAAAC
CTATATTTGCAATGTGAACCACAAACCTTCAAACA
CAAAGGTGGACAAGAAGGTGGAACCCAAATCCTGT
GATA
AAACACACACTTAATAG (SEQ ID NO: 1054)
ANT39 HC knob LALAPS
nucleotide sequence
ATGGGATGGTCATGTATCATCCTTTTTCTGGTAGC
AACTGCAACTGGAGTACATAGCGAGGTCCAGCTCG
TTGAGTCTGGAGGCGGACTAGTTCAACCTGGCGGT
TCTCTGCGCCTGTCCTGTGCCGCCTCTGGCTTTGA
CTTCACCGCATATGCCATGCACTGGGTTAGGCAGG
CCCCAGGCAAGGGGCTGGAATGGGTTGCCTCTATA
TACCCTTCCGGAGGATACACAGCCTACGCTGATAG
TGTCAAAGGCCGGTTCACCATTAGCGCTGATACCT
CCAAGAATACTGCCTACTTGCAAATGAACAGCTTA
AGGGCTGAGGATACAGCAGTCTATTACTGTGCACG
GCGATCTTACTACTTTGCTCTGGATTACTGGGGCC
AAGGCACCCTGGTCACTGTTAGTTCTGGCGGTGGT
GGCTCAGACATCCAGATGACCCAGAGCCCCAGTAG
CCTATCGGCCTCGGTTGGCGATCGAGTGACCATTA
CCTGCCGGGCAAGCCAGAGTGTTTCAAGCGCAGTG
GCTTGGTATCAGCAAAAGCCTGGCAAAGCTCCAAA
ACTGCTTATCTACTCGGCGAGCTCCTTATATAGCG
GCGTGCCTAGTAGATTCAGCGGCTCCCGGTCTGGA
ACAGACTTTACCCTCACAATTAGCTCTCTCCAACC
TGAAGACTTCGCCACATATTATTGCCAACAATATT
GGGCCTACTATTCCCCTATCACCTTTGGTCAAGGA
ACCAAGGTGGAGATCAAGGGAGGAGGTGGTTCAGG
TGGTGGAGGAAGCGAGCCCAAATCTTCCGACAAAA
CTCACACATGCCCACCGTGCCCAGCACCTGAAGCC
GCCGGGGGACCGTCAGTCTTCCTCTTCCCCCCAAA
ACCCAAGGACACCCTCATGATCTCCCGGACCCCTG
AGGTCACATGCGTGGTGGTGGACGTGAGCCACGAA
GACCCTGAGGTCAAGTTCAACTGGTACGTGGACGG
CGTGGAGGTGCATAATGCCAAGACAAAGCCGCGGG
AGGAGCAGTACAACAGCACGTACCGTGTGGTCAGC
GTCCTCACCGTCCTGCACCAGGACTGGCTGAATGG
CAAGGAGTACAAGTGCAAGGTCTCCAACAAAGCCC
TCCCAGCCTCCATCGAGAAAACCATCTCCAAAGCC
AAAGGGCAGCCCCGAGAACCAATGGTGTTCGACCT
GCCCCCATCCCGGGAGGAGATGACCAAGAACCAGG
TCAGCCTGTGGTGCATGGTCAAAGGCTTCTATCCC
AGCGACATCGCCGTGGAGTGGGAGAGCAATGGGCA
GCCGGAGAACAACTACAAGACCACGCCTCCCGTGC
TGGACTCCGACGGCTCCTTCTTCCTCTACAGCAAG
CTCACCGTGGACAAGAGCAGGTGGCAGCAGGGGAA
CGTCTTCTCATGCTCCGTGATGCATGAGGCTCTGC
ACAACCACTACACGCAGAAGAGCCTCTCCCTGTCT
CCGGGCAAAGGTGGTGGCTCTGGCGGCGGTAGCGG
GGGAGGATCTGGTGGCGGTTCTGGCTCAACCGGAG
AGGTCCAGCTTGTGGAGTCCGGCGGTGGACTGGTT
CAACCTGGCGGCTCACTCCGCCTGTCCTGTGCCGC
TTCCGGCTTCACCCTGAGTTCTTATTCAATGCATT
GGGTTAGGCAGGCACCTGGCAAAGGACTGGAATGG
GTGGCTTATATTTCATCCTATGACTCGATAACGGA
CTACGCCGATTCTGTGAAAGGTCGGTTCACCATCT
CTGCTGACACCTCCAAAAATACTGCTTACCTCCAA
ATGAACAGTCTGCGGGCTGAAGATACTGCCGTGTA
CTACTGTGCAAGACCTGCGGTTGGGCATATGGCTT
TTGACTACTGGGGTCAGGGGACACTGGTCACTGTC
TCCTCGGCGTCTACCAAAGGACCTAGCGTGTTCCC
CCTGGCTCCCTCATCCAAATCCACTAGCGGCGGTA
CCGCCGCCCTCGGCTGCCTCGTTAAGGATTACTTC
CCTGAACCAGTAACTGTTTCTTGGAATAGCGGTGC
ACTCACCTCTGGCGTGCACACCTTCCCTGCCGTCC
TGCAATCCTCCGGGCTGTATAGTCTCTCTTCTGTC
GTGACTGTGCCCTCTTCTTCCCTTGGCACCCAAAC
CTATATTTGCAATGTGAACCACAAACCTTCAAACA
CAAAGGTGGACAAGAAGGTGGAACCCAAATCCTGT
GATA
AAACACACACTTAATAG (SEQ ID NO: 1055)
ANT39 HC knob LALAPS Merchant
nucleotide sequence
ATGGGATGGTCATGTATCATCCTTTTTCTGGTAGC
AACTGCAACTGGAGTACATAGCGAGGTCCAGCTCG
TTGAGTCTGGAGGCGGACTAGTTCAACCTGGCGGT
TCTCTGCGCCTGTCCTGTGCCGCCTCTGGCTTTGA
CTTCACCGCATATGCCATGCACTGGGTTAGGCAGG
CCCCAGGCAAGGGGCTGGAATGGGTTGCCTCTATA
TACCCTTCCGGAGGATACACAGCCTACGCTGATAG
TGTCAAAGGCCGGTTCACCATTAGCGCTGATACCT
CCAAGAATACTGCCTACTTGCAAATGAACAGCTTA
AGGGCTGAGGATACAGCAGTCTATTACTGTGCACG
GCGATCTTACTACTTTGCTCTGGATTACTGGGGCC
AAGGCACCCTGGTCACTGTTAGTTCTGGCGGTGGT
GGCTCAGACATCCAGATGACCCAGAGCCCCAGTAG
CCTATCGGCCTCGGTTGGCGATCGAGTGACCATTA
CCTGCCGGGCAAGCCAGAGTGTTTCAAGCGCAGTG
GCTTGGTATCAGCAAAAGCCTGGCAAAGCTCCAAA
ACTGCTTATCTACTCGGCGAGCTCCTTATATAGCG
GCGTGCCTAGTAGATTCAGCGGCTCCCGGTCTGGA
ACAGACTTTACCCTCACAATTAGCTCTCTCCAACC
TGAAGACTTCGCCACATATTATTGCCAACAATATT
GGGCCTACTATTCCCCTATCACCTTTGGTCAAGGA
ACCAAGGTGGAGATCAAGGGAGGAGGTGGTTCAGG
TGGTGGAGGAAGCGAGCCCAAATCTTCCGACAAAA
CTCACACATGCCCACCGTGCCCAGCACCTGAAGCC
GCCGGGGGACCGTCAGTCTTCCTCTTCCCCCCAAA
ACCCAAGGACACCCTCATGATCTCCCGGACCCCTG
AGGTCACATGCGTGGTGGTGGACGTGAGCCACGAA
GACCCTGAGGTCAAGTTCAACTGGTACGTGGACGG
CGTGGAGGTGCATAATGCCAAGACAAAGCCGCGGG
AGGAGCAGTACAACAGCACGTACCGTGTGGTCAGC
GTCCTCACCGTCCTGCACCAGGACTGGCTGAATGG
CAAGGAGTACAAGTGCAAGGTCTCCAACAAAGCCC
TCCCAGCCTCCATCGAGAAAACCATCTCCAAAGCC
AAAGGGCAGCCCCGAGAACCACAGGTGTACACCCT
GCCCCCATCCCGGGAGGAGATGACCAAGAACCAGG
TCAGCCTGTGGTGCCTGGTCAAAGGCTTCTATCCC
AGCGACATCGCCGTGGAGTGGGAGAGCAATGGGCA
GCCGGAGAACAACTACAAGACCACGCCTCCCGTGC
TGGACTCCGACGGCTCCTTCTTCCTCTACAGCAAG
CTCACCGTGGACAAGAGCAGGTGGCAGCAGGGGAA
CGTCTTCTCATGCTCCGTGATGCATGAGGCTCTGC
ACAACCACTACACGCAGAAGAGCCTCTCCCTGTCT
CCGGGCAAAGGTGGTGGCTCTGGCGGCGGTAGCGG
GGGAGGATCTGGTGGCGGTTCTGGCTCAACCGGAG
AGGTCCAGCTTGTGGAGTCCGGCGGTGGACTGGTT
CAACCTGGCGGCTCACTCCGCCTGTCCTGTGCCGC
TTCCGGCTTCACCCTGAGTTCTTATTCAATGCATT
GGGTTAGGCAGGCACCTGGCAAAGGACTGGAATGG
GTGGCTTATATTTCATCCTATGACTCGATAACGGA
CTACGCCGATTCTGTGAAAGGTCGGTTCACCATCT
CTGCTGACACCTCCAAAAATACTGCTTACCTCCAA
ATGAACAGTCTGCGGGCTGAAGATACTGCCGTGTA
CTACTGTGCAAGACCTGCGGTTGGGCATATGGCTT
TTGACTACTGGGGTCAGGGGACACTGGTCACTGTC
TCCTCGGCGTCTACCAAAGGACCTAGCGTGTTCCC
CCTGGCTCCCTCATCCAAATCCACTAGCGGCGGTA
CCGCCGCCCTCGGCTGCCTCGTTAAGGATTACTTC
CCTGAACCAGTAACTGTTTCTTGGAATAGCGGTGC
ACTCACCTCTGGCGTGCACACCTTCCCTGCCGTCC
TGCAATCCTCCGGGCTGTATAGTCTCTCTTCTGTC
GTGACTGTGCCCTCTTCTTCCCTTGGCACCCAAAC
CTATATTTGCAATGTGAACCACAAACCTTCAAACA
CAAAGGTGGACAAGAAGGTGGAACCCAAATCCTGT
GATA
AAACACACACTTAATAG (SEQ ID NO: 1056)
ANT39 HC knob LALAPS Merchant S-S
nucleotide sequence
ATGGGATGGTCATGTATCATCCTTTTTCTGGTAGC
AACTGCAACTGGAGTACATAGCGAGGTCCAGCTCG
TTGAGTCTGGAGGCGGACTAGTTCAACCTGGCGGT
TCTCTGCGCCTGTCCTGTGCCGCCTCTGGCTTTGA
CTTCACCGCATATGCCATGCACTGGGTTAGGCAGG
CCCCAGGCAAGGGGCTGGAATGGGTTGCCTCTATA
TACCCTTCCGGAGGATACACAGCCTACGCTGATAG
TGTCAAAGGCCGGTTCACCATTAGCGCTGATACCT
CCAAGAATACTGCCTACTTGCAAATGAACAGCTTA
AGGGCTGAGGATACAGCAGTCTATTACTGTGCACG
GCGATCTTACTACTTTGCTCTGGATTACTGGGGCC
AAGGCACCCTGGTCACTGTTAGTTCTGGCGGTGGT
GGCTCAGACATCCAGATGACCCAGAGCCCCAGTAG
CCTATCGGCCTCGGTTGGCGATCGAGTGACCATTA
CCTGCCGGGCAAGCCAGAGTGTTTCAAGCGCAGTG
GCTTGGTATCAGCAAAAGCCTGGCAAAGCTCCAAA
ACTGCTTATCTACTCGGCGAGCTCCTTATATAGCG
GCGTGCCTAGTAGATTCAGCGGCTCCCGGTCTGGA
ACAGACTTTACCCTCACAATTAGCTCTCTCCAACC
TGAAGACTTCGCCACATATTATTGCCAACAATATT
GGGCCTACTATTCCCCTATCACCTTTGGTCAAGGA
ACCAAGGTGGAGATCAAGGGAGGAGGTGGTTCAGG
TGGTGGAGGAAGCGAGCCCAAATCTTCCGACAAAA
CTCACACATGCCCACCGTGCCCAGCACCTGAAGCC
GCCGGGGGACCGTCAGTCTTCCTCTTCCCCCCAAA
ACCCAAGGACACCCTCATGATCTCCCGGACCCCTG
AGGTCACATGCGTGGTGGTGGACGTGAGCCACGAA
GACCCTGAGGTCAAGTTCAACTGGTACGTGGACGG
CGTGGAGGTGCATAATGCCAAGACAAAGCCGCGGG
AGGAGCAGTACAACAGCACGTACCGTGTGGTCAGC
GTCCTCACCGTCCTGCACCAGGACTGGCTGAATGG
CAAGGAGTACAAGTGCAAGGTCTCCAACAAAGCCC
TCCCAGCCTCCATCGAGAAAACCATCTCCAAAGCC
AAAGGGCAGCCCCGAGAACCACAGGTGTACACCCT
GCCCCCATGCCGGGAGGAGATGACCAAGAACCAGG
TCAGCCTGTGGTGCCTGGTCAAAGGCTTCTATCCC
AGCGACATCGCCGTGGAGTGGGAGAGCAATGGGCA
GCCGGAGAACAACTACAAGACCACGCCTCCCGTGC
TGGACTCCGACGGCTCCTTCTTCCTCTACAGCAAG
CTCACCGTGGACAAGAGCAGGTGGCAGCAGGGGAA
CGTCTTCTCATGCTCCGTGATGCATGAGGCTCTGC
ACAACCACTACACGCAGAAGAGCCTCTCCCTGTCT
CCGGGCAAAGGTGGTGGCTCTGGCGGCGGTAGCGG
GGGAGGATCTGGTGGCGGTTCTGGCTCAACCGGAG
AGGTCCAGCTTGTGGAGTCCGGCGGTGGACTGGTT
CAACCTGGCGGCTCACTCCGCCTGTCCTGTGCCGC
TTCCGGCTTCACCCTGAGTTCTTATTCAATGCATT
GGGTTAGGCAGGCACCTGGCAAAGGACTGGAATGG
GTGGCTTATATTTCATCCTATGACTCGATAACGGA
CTACGCCGATTCTGTGAAAGGTCGGTTCACCATCT
CTGCTGACACCTCCAAAAATACTGCTTACCTCCAA
ATGAACAGTCTGCGGGCTGAAGATACTGCCGTGTA
CTACTGTGCAAGACCTGCGGTTGGGCATATGGCTT
TTGACTACTGGGGTCAGGGGACACTGGTCACTGTC
TCCTCGGCGTCTACCAAAGGACCTAGCGTGTTCCC
CCTGGCTCCCTCATCCAAATCCACTAGCGGCGGTA
CCGCCGCCCTCGGCTGCCTCGTTAAGGATTACTTC
CCTGAACCAGTAACTGTTTCTTGGAATAGCGGTGC
ACTCACCTCTGGCGTGCACACCTTCCCTGCCGTCC
TGCAATCCTCCGGGCTGTATAGTCTCTCTTCTGTC
GTGACTGTGCCCTCTTCTTCCCTTGGCACCCAAAC
CTATATTTGCAATGTGAACCACAAACCTTCAAACA
CAAAGGTGGACAAGAAGGTGGAACCCAAATCCTGT
GATA
AAACACACACTTAATAG (SEQ ID NO: 1057)
Mature ANT39 HC knob DANG
nucleotide sequence
GAGGTCCAGCTCGTTGAGTCTGGAGGCGGACTAGT
TCAACCTGGCGGTTCTCTGCGCCTGTCCTGTGCCG
CCTCTGGCTTTGACTTCACCGCATATGCCATGCAC
TGGGTTAGGCAGGCCCCAGGCAAGGGGCTGGAATG
GGTTGCCTCTATATACCCTTCCGGAGGATACACAG
CCTACGCTGATAGTGTCAAAGGCCGGTTCACCATT
AGCGCTGATACCTCCAAGAATACTGCCTACTTGCA
AATGAACAGCTTAAGGGCTGAGGATACAGCAGTCT
ATTACTGTGCACGGCGATCTTACTACTTTGCTCTG
GATTACTGGGGCCAAGGCACCCTGGTCACTGTTAG
TTCTGGCGGTGGTGGCTCAGACATCCAGATGACCC
AGAGCCCCAGTAGCCTATCGGCCTCGGTTGGCGAT
CGAGTGACCATTACCTGCCGGGCAAGCCAGAGTGT
TTCAAGCGCAGTGGCTTGGTATCAGCAAAAGCCTG
GCAAAGCTCCAAAACTGCTTATCTACTCGGCGAGC
TCCTTATATAGCGGCGTGCCTAGTAGATTCAGCGG
CTCCCGGTCTGGAACAGACTTTACCCTCACAATTA
GCTCTCTCCAACCTGAAGACTTCGCCACATATTAT
TGCCAACAATATTGGGCCTACTATTCCCCTATCAC
CTTTGGTCAAGGAACCAAGGTGGAGATCAAGGGAG
GAGGTGGTTCAGGTGGTGGAGGAAGCGAGCCCAAA
TCTTCCGACAAAACTCACACATGCCCACCGTGCCC
AGCACCTGAACTCCTGGGGGGACCGTCAGTCTTCC
TCTTCCCCCCAAAACCCAAGGACACCCTCATGATC
TCCCGGACCCCTGAGGTCACATGCGTGGTGGTGGC
CGTGAGCCACGAAGACCCTGAGGTCAAGTTCAACT
GGTACGTGGACGGCGTGGAGGTGCATAATGCCAAG
ACAAAGCCGCGGGAGGAGCAGTACGGCAGCACGTA
CCGTGTGGTCAGCGTCCTCACCGTCCTGCACCAGG
ACTGGCTGAATGGCAAGGAGTACAAGTGCAAGGTC
TCCAACAAAGCCCTCCCAGCCCCCATCGAGAAAAC
CATCTCCAAAGCCAAAGGGCAGCCCCGAGAACCAA
TGGTGTTCGACCTGCCCCCATCCCGGGAGGAGATG
ACCAAGAACCAGGTCAGCCTGTGGTGCATGGTCAA
AGGCTTCTATCCCAGCGACATCGCCGTGGAGTGGG
AGAGCAATGGGCAGCCGGAGAACAACTACAAGACC
ACGCCTCCCGTGCTGGACTCCGACGGCTCCTTCTT
CCTCTACAGCAAGCTCACCGTGGACAAGAGCAGGT
GGCAGCAGGGGAACGTCTTCTCATGCTCCGTGATG
CATGAGGCTCTGCACAACCACTACACGCAGAAGAG
CCTCTCCCTGTCTCCGGGCAAAGGTGGTGGCTCTG
GCGGCGGTAGCGGGGGAGGATCTGGTGGCGGTTCT
GGCTCAACCGGAGAGGTCCAGCTTGTGGAGTCCGG
CGGTGGACTGGTTCAACCTGGCGGCTCACTCCGCC
TGTCCTGTGCCGCTTCCGGCTTCACCCTGAGTTCT
TATTCAATGCATTGGGTTAGGCAGGCACCTGGCAA
AGGACTGGAATGGGTGGCTTATATTTCATCCTATG
ACTCGATAACGGACTACGCCGATTCTGTGAAAGGT
CGGTTCACCATCTCTGCTGACACCTCCAAAAATAC
TGCTTACCTCCAAATGAACAGTCTGCGGGCTGAAG
ATACTGCCGTGTACTACTGTGCAAGACCTGCGGTT
GGGCATATGGCTTTTGACTACTGGGGTCAGGGGAC
ACTGGTCACTGTCTCCTCGGCGTCTACCAAAGGAC
CTAGCGTGTTCCCCCTGGCTCCCTCATCCAAATCC
ACTAGCGGCGGTACCGCCGCCCTCGGCTGCCTCGT
TAAGGATTACTTCCCTGAACCAGTAACTGTTTCTT
GGAATAGCGGTGCACTCACCTCTGGCGTGCACACC
TTCCCTGCCGTCCTGCAATCCTCCGGGCTGTATAG
TCTCTCTTCTGTCGTGACTGTGCCCTCTTCTTCCC
TTGGCACCCAAACCTATATTTGCAATGTGAACCAC
AAACCTTCAAACACAAAGGTGGACAAGAAGGTGGA
ACCCAAATCCT
GTGATAAAACACACACTTAATAG
(SEQ ID NO: 1058)
Mature ANT39 HC knob LALAPS
nucleotidesequence
GAGGTCCAGCTCGTTGAGTCTGGAGGCGGACTAGT
TCAACCTGGCGGTTCTCTGCGCCTGTCCTGTGCCG
CCTCTGGCTTTGACTTCACCGCATATGCCATGCAC
TGGGTTAGGCAGGCCCCAGGCAAGGGGCTGGAATG
GGTTGCCTCTATATACCCTTCCGGAGGATACACAG
CCTACGCTGATAGTGTCAAAGGCCGGTTCACCATT
AGCGCTGATACCTCCAAGAATACTGCCTACTTGCA
AATGAACAGCTTAAGGGCTGAGGATACAGCAGTCT
ATTACTGTGCACGGCGATCTTACTACTTTGCTCTG
GATTACTGGGGCCAAGGCACCCTGGTCACTGTTAG
TTCTGGCGGTGGTGGCTCAGACATCCAGATGACCC
AGAGCCCCAGTAGCCTATCGGCCTCGGTTGGCGAT
CGAGTGACCATTACCTGCCGGGCAAGCCAGAGTGT
TTCAAGCGCAGTGGCTTGGTATCAGCAAAAGCCTG
GCAAAGCTCCAAAACTGCTTATCTACTCGGCGAGC
TCCTTATATAGCGGCGTGCCTAGTAGATTCAGCGG
CTCCCGGTCTGGAACAGACTTTACCCTCACAATTA
GCTCTCTCCAACCTGAAGACTTCGCCACATATTAT
TGCCAACAATATTGGGCCTACTATTCCCCTATCAC
CTTTGGTCAAGGAACCAAGGTGGAGATCAAGGGAG
GAGGTGGTTCAGGTGGTGGAGGAAGCGAGCCCAAA
TCTTCCGACAAAACTCACACATGCCCACCGTGCCC
AGCACCTGAAGCCGCCGGGGGACCGTCAGTCTTCC
TCTTCCCCCCAAAACCCAAGGACACCCTCATGATC
TCCCGGACCCCTGAGGTCACATGCGTGGTGGTGGA
CGTGAGCCACGAAGACCCTGAGGTCAAGTTCAACT
GGTACGTGGACGGCGTGGAGGTGCATAATGCCAAG
ACAAAGCCGCGGGAGGAGCAGTACAACAGCACGTA
CCGTGTGGTCAGCGTCCTCACCGTCCTGCACCAGG
ACTGGCTGAATGGCAAGGAGTACAAGTGCAAGGTC
TCCAACAAAGCCCTCCCAGCCTCCATCGAGAAAAC
CATCTCCAAAGCCAAAGGGCAGCCCCGAGAACCAA
TGGTGTTCGACCTGCCCCCATCCCGGGAGGAGATG
ACCAAGAACCAGGTCAGCCTGTGGTGCATGGTCAA
AGGCTTCTATCCCAGCGACATCGCCGTGGAGTGGG
AGAGCAATGGGCAGCCGGAGAACAACTACAAGACC
ACGCCTCCCGTGCTGGACTCCGACGGCTCCTTCTT
CCTCTACAGCAAGCTCACCGTGGACAAGAGCAGGT
GGCAGCAGGGGAACGTCTTCTCATGCTCCGTGATG
CATGAGGCTCTGCACAACCACTACACGCAGAAGAG
CCTCTCCCTGTCTCCGGGCAAAGGTGGTGGCTCTG
GCGGCGGTAGCGGGGGAGGATCTGGTGGCGGTTCT
GGCTCAACCGGAGAGGTCCAGCTTGTGGAGTCCGG
CGGTGGACTGGTTCAACCTGGCGGCTCACTCCGCC
TGTCCTGTGCCGCTTCCGGCTTCACCCTGAGTTCT
TATTCAATGCATTGGGTTAGGCAGGCACCTGGCAA
AGGACTGGAATGGGTGGCTTATATTTCATCCTATG
ACTCGATAACGGACTACGCCGATTCTGTGAAAGGT
CGGTTCACCATCTCTGCTGACACCTCCAAAAATAC
TGCTTACCTCCAAATGAACAGTCTGCGGGCTGAAG
ATACTGCCGTGTACTACTGTGCAAGACCTGCGGTT
GGGCATATGGCTTTTGACTACTGGGGTCAGGGGAC
ACTGGTCACTGTCTCCTCGGCGTCTACCAAAGGAC
CTAGCGTGTTCCCCCTGGCTCCCTCATCCAAATCC
ACTAGCGGCGGTACCGCCGCCCTCGGCTGCCTCGT
TAAGGATTACTTCCCTGAACCAGTAACTGTTTCTT
GGAATAGCGGTGCACTCACCTCTGGCGTGCACACC
TTCCCTGCCGTCCTGCAATCCTCCGGGCTGTATAG
TCTCTCTTCTGTCGTGACTGTGCCCTCTTCTTCCC
TTGGCACCCAAACCTATATTTGCAATGTGAACCAC
AAACCTTCAAACACAAAGGTGGACAAGAAGGTGGA
ACCCAAATCCT
GTGATAAAACACACACTTAATAG
(SEQ ID NO: 1059)
Mature ANT39 HC knob LALAPS Merchant
nucleotide sequence
GAGGTCCAGCTCGTTGAGTCTGGAGGCGGACTAGT
TCAACCTGGCGGTTCTCTGCGCCTGTCCTGTGCCG
CCTCTGGCTTTGACTTCACCGCATATGCCATGCAC
TGGGTTAGGCAGGCCCCAGGCAAGGGGCTGGAATG
GGTTGCCTCTATATACCCTTCCGGAGGATACACAG
CCTACGCTGATAGTGTCAAAGGCCGGTTCACCATT
AGCGCTGATACCTCCAAGAATACTGCCTACTTGCA
AATGAACAGCTTAAGGGCTGAGGATACAGCAGTCT
ATTACTGTGCACGGCGATCTTACTACTTTGCTCTG
GATTACTGGGGCCAAGGCACCCTGGTCACTGTTAG
TTCTGGCGGTGGTGGCTCAGACATCCAGATGACCC
AGAGCCCCAGTAGCCTATCGGCCTCGGTTGGCGAT
CGAGTGACCATTACCTGCCGGGCAAGCCAGAGTGT
TTCAAGCGCAGTGGCTTGGTATCAGCAAAAGCCTG
GCAAAGCTCCAAAACTGCTTATCTACTCGGCGAGC
TCCTTATATAGCGGCGTGCCTAGTAGATTCAGCGG
CTCCCGGTCTGGAACAGACTTTACCCTCACAATTA
GCTCTCTCCAACCTGAAGACTTCGCCACATATTAT
TGCCAACAATATTGGGCCTACTATTCCCCTATCAC
CTTTGGTCAAGGAACCAAGGTGGAGATCAAGGGAG
GAGGTGGTTCAGGTGGTGGAGGAAGCGAGCCCAAA
TCTTCCGACAAAACTCACACATGCCCACCGTGCCC
AGCACCTGAAGCCGCCGGGGGACCGTCAGTCTTCC
TCTTCCCCCCAAAACCCAAGGACACCCTCATGATC
TCCCGGACCCCTGAGGTCACATGCGTGGTGGTGGA
CGTGAGCCACGAAGACCCTGAGGTCAAGTTCAACT
GGTACGTGGACGGCGTGGAGGTGCATAATGCCAAG
ACAAAGCCGCGGGAGGAGCAGTACAACAGCACGTA
CCGTGTGGTCAGCGTCCTCACCGTCCTGCACCAGG
ACTGGCTGAATGGCAAGGAGTACAAGTGCAAGGTC
TCCAACAAAGCCCTCCCAGCCTCCATCGAGAAAAC
CATCTCCAAAGCCAAAGGGCAGCCCCGAGAACCAC
AGGTGTACACCCTGCCCCCATCCCGGGAGGAGATG
ACCAAGAACCAGGTCAGCCTGTGGTGCCTGGTCAA
AGGCTTCTATCCCAGCGACATCGCCGTGGAGTGGG
AGAGCAATGGGCAGCCGGAGAACAACTACAAGACC
ACGCCTCCCGTGCTGGACTCCGACGGCTCCTTCTT
CCTCTACAGCAAGCTCACCGTGGACAAGAGCAGGT
GGCAGCAGGGGAACGTCTTCTCATGCTCCGTGATG
CATGAGGCTCTGCACAACCACTACACGCAGAAGAG
CCTCTCCCTGTCTCCGGGCAAAGGTGGTGGCTCTG
GCGGCGGTAGCGGGGGAGGATCTGGTGGCGGTTCT
GGCTCAACCGGAGAGGTCCAGCTTGTGGAGTCCGG
CGGTGGACTGGTTCAACCTGGCGGCTCACTCCGCC
TGTCCTGTGCCGCTTCCGGCTTCACCCTGAGTTCT
TATTCAATGCATTGGGTTAGGCAGGCACCTGGCAA
AGGACTGGAATGGGTGGCTTATATTTCATCCTATG
ACTCGATAACGGACTACGCCGATTCTGTGAAAGGT
CGGTTCACCATCTCTGCTGACACCTCCAAAAATAC
TGCTTACCTCCAAATGAACAGTCTGCGGGCTGAAG
ATACTGCCGTGTACTACTGTGCAAGACCTGCGGTT
GGGCATATGGCTTTTGACTACTGGGGTCAGGGGAC
ACTGGTCACTGTCTCCTCGGCGTCTACCAAAGGAC
CTAGCGTGTTCCCCCTGGCTCCCTCATCCAAATCC
ACTAGCGGCGGTACCGCCGCCCTCGGCTGCCTCGT
TAAGGATTACTTCCCTGAACCAGTAACTGTTTCTT
GGAATAGCGGTGCACTCACCTCTGGCGTGCACACC
TTCCCTGCCGTCCTGCAATCCTCCGGGCTGTATAG
TCTCTCTTCTGTCGTGACTGTGCCCTCTTCTTCCC
TTGGCACCCAAACCTATATTTGCAATGTGAACCAC
AAACCTTCAAACACAAAGGTGGACAAGAAGGTGGA
ACCCAAATCCTGTGATAAAACACACACTTAATAG
(SEQ ID NO: 1060)
Mature ANT39 HC knob LALAPS Merchant
S-S nucleotide sequence
GAGGTCCAGCTCGTTGAGTCTGGAGGCGGACTAGT
TCAACCTGGCGGTTCTCTGCGCCTGTCCTGTGCCG
CCTCTGGCTTTGACTTCACCGCATATGCCATGCAC
TGGGTTAGGCAGGCCCCAGGCAAGGGGCTGGAATG
GGTTGCCTCTATATACCCTTCCGGAGGATACACAG
CCTACGCTGATAGTGTCAAAGGCCGGTTCACCATT
AGCGCTGATACCTCCAAGAATACTGCCTACTTGCA
AATGAACAGCTTAAGGGCTGAGGATACAGCAGTCT
ATTACTGTGCACGGCGATCTTACTACTTTGCTCTG
GATTACTGGGGCCAAGGCACCCTGGTCACTGTTAG
TTCTGGCGGTGGTGGCTCAGACATCCAGATGACCC
AGAGCCCCAGTAGCCTATCGGCCTCGGTTGGCGAT
CGAGTGACCATTACCTGCCGGGCAAGCCAGAGTGT
TTCAAGCGCAGTGGCTTGGTATCAGCAAAAGCCTG
GCAAAGCTCCAAAACTGCTTATCTACTCGGCGAGC
TCCTTATATAGCGGCGTGCCTAGTAGATTCAGCGG
CTCCCGGTCTGGAACAGACTTTACCCTCACAATTA
GCTCTCTCCAACCTGAAGACTTCGCCACATATTAT
TGCCAACAATATTGGGCCTACTATTCCCCTATCAC
CTTTGGTCAAGGAACCAAGGTGGAGATCAAGGGAG
GAGGTGGTTCAGGTGGTGGAGGAAGCGAGCCCAAA
TCTTCCGACAAAACTCACACATGCCCACCGTGCCC
AGCACCTGAAGCCGCCGGGGGACCGTCAGTCTTCC
TCTTCCCCCCAAAACCCAAGGACACCCTCATGATC
TCCCGGACCCCTGAGGTCACATGCGTGGTGGTGGA
CGTGAGCCACGAAGACCCTGAGGTCAAGTTCAACT
GGTACGTGGACGGCGTGGAGGTGCATAATGCCAAG
ACAAAGCCGCGGGAGGAGCAGTACAACAGCACGTA
CCGTGTGGTCAGCGTCCTCACCGTCCTGCACCAGG
ACTGGCTGAATGGCAAGGAGTACAAGTGCAAGGTC
TCCAACAAAGCCCTCCCAGCCTCCATCGAGAAAAC
CATCTCCAAAGCCAAAGGGCAGCCCCGAGAACCAC
AGGTGTACACCCTGCCCCCATGCCGGGAGGAGATG
ACCAAGAACCAGGTCAGCCTGTGGTGCCTGGTCAA
AGGCTTCTATCCCAGCGACATCGCCGTGGAGTGGG
AGAGCAATGGGCAGCCGGAGAACAACTACAAGACC
ACGCCTCCCGTGCTGGACTCCGACGGCTCCTTCTT
CCTCTACAGCAAGCTCACCGTGGACAAGAGCAGGT
GGCAGCAGGGGAACGTCTTCTCATGCTCCGTGATG
CATGAGGCTCTGCACAACCACTACACGCAGAAGAG
CCTCTCCCTGTCTCCGGGCAAAGGTGGTGGCTCTG
GCGGCGGTAGCGGGGGAGGATCTGGTGGCGGTTCT
GGCTCAACCGGAGAGGTCCAGCTTGTGGAGTCCGG
CGGTGGACTGGTTCAACCTGGCGGCTCACTCCGCC
TGTCCTGTGCCGCTTCCGGCTTCACCCTGAGTTCT
TATTCAATGCATTGGGTTAGGCAGGCACCTGGCAA
AGGACTGGAATGGGTGGCTTATATTTCATCCTATG
ACTCGATAACGGACTACGCCGATTCTGTGAAAGGT
CGGTTCACCATCTCTGCTGACACCTCCAAAAATAC
TGCTTACCTCCAAATGAACAGTCTGCGGGCTGAAG
ATACTGCCGTGTACTACTGTGCAAGACCTGCGGTT
GGGCATATGGCTTTTGACTACTGGGGTCAGGGGAC
ACTGGTCACTGTCTCCTCGGCGTCTACCAAAGGAC
CTAGCGTGTTCCCCCTGGCTCCCTCATCCAAATCC
ACTAGCGGCGGTACCGCCGCCCTCGGCTGCCTCGT
TAAGGATTACTTCCCTGAACCAGTAACTGTTTCTT
GGAATAGCGGTGCACTCACCTCTGGCGTGCACACC
TTCCCTGCCGTCCTGCAATCCTCCGGGCTGTATAG
TCTCTCTTCTGTCGTGACTGTGCCCTCTTCTTCCC
TTGGCACCCAAACCTATATTTGCAATGTGAACCAC
AAACCTTCAAACACAAAGGTGGACAAGAAGGTGGA
ACCCAAATCCTGTGATAAAACACACACTTAATAG
(SEQ ID NO: 1061)
ANT39 LC
nucleotide sequence
ATGGAGACAGACACACTCCTGCTATGGGTACTGCT
GCTCTGGGTTCCAGGCTCCACCGGCGACATCCAGA
TGACCCAGTCTCCTAGCTCCCTGTCCGCGTCGGTT
GGAGACCGGGTAACTATTACTTGCCGAGCAAGCCA
GTCCGTGTCATCTGCGGTGGCCTGGTATCAGCAAA
AGCCCGGCAAGGCCCCTAAGCTTCTGATCTATTCC
GCCTCTTCTCTGTATAGCGGCGTGCCATCACGGTT
CTCTGGATCTCGCTCTGGGACCGACTTCACTCTCA
CTATTTCCAGCTTGCAGCCAGAAGATTTTGCAACA
TATTACTGTCAACAATGGTACAACGCTCCTATCAC
TTTCGGCCAAGGCACCAAGGTGGAGATCAAGCGTA
CGGTGGCTGCACCATCTGTCTTCATCTTCCCGCCA
TCTGATGAGCAGTTGAAATCTGGAACTGCCTCTGT
TGTGTGCCTGCTGAATAACTTCTATCCCAGAGAGG
CCAAAGTACAGTGGAAGGTGGATAACGCCCTCCAA
TCGGGTAACTCCCAGGAGAGTGTCACAGAGCAGGA
CAGCAAGGACAGCACCTACAGCCTCAGCAGCACCC
TGACGCTGAGCAAAGCAGACTACGAGAAACACAAA
GTCTACGCCTGCGAAGTCACCCATCAGGGCCTGAG
CTCGCCCGTCACAAAGAGCTTCAACAGGGGAGAGT
GTTAATAG
(SEQ ID NO: 1062)
Mature ANT39 LC nucleotide sequence
GACATCCAGATGACCCAGTCTCCTAGCTCCCTGTC
CGCGTCGGTTGGAGACCGGGTAACTATTACTTGCC
GAGCAAGCCAGTCCGTGTCATCTGCGGTGGCCTGG
TATCAGCAAAAGCCCGGCAAGGCCCCTAAGCTTCT
GATCTATTCCGCCTCTTCTCTGTATAGCGGCGTGC
CATCACGGTTCTCTGGATCTCGCTCTGGGACCGAC
TTCACTCTCACTATTTCCAGCTTGCAGCCAGAAGA
TTTTGCAACATATTACTGTCAACAATGGTACAACG
CTCCTATCACTTTCGGCCAAGGCACCAAGGTGGAG
ATCAAGCGTACGGTGGCTGCACCATCTGTCTTCAT
CTTCCCGCCATCTGATGAGCAGTTGAAATCTGGAA
CTGCCTCTGTTGTGTGCCTGCTGAATAACTTCTAT
CCCAGAGAGGCCAAAGTACAGTGGAAGGTGGATAA
CGCCCTCCAATCGGGTAACTCCCAGGAGAGTGTCA
CAGAGCAGGACAGCAAGGACAGCACCTACAGCCTC
AGCAGCACCCTGACGCTGAGCAAAGCAGACTACGA
GAAACACAAAGTCTACGCCTGCGAAGTCACCCATC
AGGGCCTGAGCTCGCCCGTCACAAAGAGCTTCAAC
AGGGGAGAGTGTTAATAG
(SEQ ID NO: 1063)

1. A tetravalent binding antibody molecule comprising:
(a) an Fc domain or fragment thereof comprising a constant heavy chain domain 3 (CH3),
(b) a bivalent low-density lipoprotein receptor-related protein 5 (LRP5) binding domain and
(c) a bivalent Frizzled (FZD) binding domain,
wherein the LRP5 binding domain is attached to one terminus of the Fc domain and the FZD binding domain is attached to the other end of the Fc domain,
wherein the LRP5 binding domain comprises a diabody that binds LRP5 and the FZD binding domain comprises two scFv or two Fab that bind FZD4.

2. The tetravalent binding antibody molecule of claim 1, wherein
(a) the LRP5 binding domain diabody is attached to the N-terminal of the Fc domain, and
(b) the FZD4 binding domain is attached to the C-terminal of the Fc domain.

3. The tetravalent binding antibody molecule of claim 2, wherein
(a) the LRP5 binding domain diabody is attached to the N-terminal of the Fc domain via a VL or VH of the diabody, and
(b) the FZD binding domain comprises two FZD binding Fabs fused to the C-terminal of the Fc, wherein each Fab is attached to the Fc domain via a heavy or light chain variable domain (VH or VL) of the Fab linked to the CH3 domain of the Fc domain.

4. A tetravalent binding antibody molecule comprising an N-terminal LRP5-binding diabody and a C-terminal domain comprising two FZD4-binding scFv, the tetravalent binding antibody molecule comprising
a dimer of a first and second monomer, wherein each monomer comprises a single-chain polypeptide comprising, from N-terminus to C-terminus:
(a) a first peptide, said first peptide comprising a first heavy chain variable domain (VH) and a first light chain variable (VL) domain that bind LRP5,
(b) an Fc region, or fragment thereof comprising a constant heavy chain domain 3 (CH3), and
(c) a second peptide, said second peptide comprising a second VL and a second VH that bind a FZD4, and
a first and second light chain monomer, each light chain monomer comprising from N terminus to C terminus a VL that binds the FZD4, linked to a constant light chain domain 1 (CL1 domain),
wherein the first and second monomers dimerize via the Fc regions or fragments thereof, the first VH and VL of each monomer pairs with the first VH and VL of the other monomer forming a diabody that binds LRP5 and the second VL and VH of each monomer pair to form a scFvs that bind FZD4, and
wherein the LRP5-binding diabody forms the N-terminal LRP5-binding domain of the tetravalent binding antibody molecule and the two FZD4-binding scFvs form the C-terminal FZD-binding domain of the tetravalent binding antibody molecule.

5. The tetravalent binding antibody molecule of claim 1, wherein the FZD binding domain is attached to the N-terminal of the Fc domain and the LRP5 binding domain is attached to the C-terminal of the Fc domain.

6. The tetravalent binding antibody molecule of claim 5, wherein
(a) the FZD binding domain comprises two Fabs that bind the FZD4, wherein each Fab is attached to N-terminal of the Fc domain via a heavy or light chain variable domain (VH or VL) of the Fab linked to the CH2 domain of the Fc domain, and
(b) the LRP5 binding domain comprises a diabody or two scFv that bind LRP5, wherein the diabody or two scFv are attached to the C-terminal of the Fc domain via a VL or VH of the diabody or scFv linked to the CH3 of the Fc domain.

7. A tetravalent binding antibody molecule comprising an Fc domain or fragment thereof comprising a constant heavy chain domain 3 (CH3), an N-terminal FZD4 binding domain comprising two FZD4-binding Fabs and a C-terminal LRP5 binding domain comprising a LRP5 binding diabody, the tetravalent binding antibody molecule comprising
(a) a first and second heavy chain monomer, wherein each heavy chain monomer comprises a single-chain polypeptide comprising from N-terminus to C-terminus:
(i) a heavy chain variable domain (VH) that binds FZD4, linked to
(ii) a heavy chain constant region domain 1 (CH1 domain), linked to
(iii) the CH2 domain of the Fc region linked to
(iv) a peptide comprising a VH that binds a LRP5 co-receptor, linked to a light chain variable domain (VL) that binds a LRP5 co-receptor, and
(b) a first and second light chain monomer, each light chain monomer comprising from N terminus to C terminus a VL that binds the FZD4, linked to a constant light chain domain 1 (CL1 domain),
wherein the first and second heavy chain monomers dimerize via their Fc regions, or fragments thereof,
wherein a linker between the VH and VL that binds the LRP5 is of a length that promotes the pairing of the VH and VL of the first heavy chain monomer with the VL and VH of the second heavy chain monomer thereby forming a LRP5 co-receptor binding diabody and the FZD-binding Fabs are formed by the pairing of each heavy chain monomer with a light chain monomer such that the VH that binds FZD4 and CH1 of each of the heavy chain monomer, pairs with the VL that binds FZD4 and CL1 of the light chain monomers, and
wherein the Fabs form the FZD4-binding domain on the N-terminus of the Fc domain and the diabody forms the LRP5 co-receptor-binding domain on the C-terminus of the Fc domain.

8. The tetravalent binding antibody molecule of claim 1, wherein the LRP5 binding diabody is a bispecific bivalent LRP5 binding domain that binds to two epitopes within the LRP5 co-receptor extracellular domain.

9. The tetravalent binding antibody molecule of claim 8, wherein the LPR5 binding domain interacts with the Wnt1 and Wnt3 epitopes of the LRP5 co-receptor.

10. The tetravalent binding antibody molecule of claim 1, wherein the FZD binding domain is monospecific.

11. The tetravalent binding antibody molecule of claim 1, wherein
the diabody of the LRP5 binding domain binds LRP5 and comprises heavy chain complementary determining regions CDR-H1, CDR-H2 and CDR-H3 and light chain complementary determining regions CDR-L1, CDR-L2 and CDR-L3, of an antibody set forth in the sequences in Table 3 or Table 6A.

12. The tetravalent binding antibody molecule of claim 1 wherein the Fc domain or fragment thereof dimerize via a knob-in-hole configuration of the Fc regions or fragments thereof.

13.-15. (canceled)

16. The tetravalent binding antibody molecule of claim 1, wherein the Fc domain lacks one or more effector functions.

17.-19. (canceled)

20. The tetravalent binding antibody molecule of claim 16, wherein the Fc regions contain mutations that alter their effector function due to amino acid mutations L234A, L235A and P331S (LALAPS).

21.-25. (canceled)

26. The tetravalent binding antibody molecule of claim 1, wherein the FZD binding domain comprises two Fabs that bind FZD4.

27. The tetravalent binding antibody molecule of claim 26, wherein the FZD-binding Fab comprise light chain complementary determining regions CDR-L1, CDR-L2 and CDR-L3 and heavy chain CDRs, CDR-H1, CDR-H2 and CDR-H3 of an antibody set forth in the sequences in Table 1, Table 2 or Table 6.

28. The tetravalent binding antibody molecule of claim 1 comprising,
(a) a dimer of a first and second heavy chain monomer, each monomer comprising a single-chain polypeptide comprising, from N-terminus to C-terminus:
(1) a peptide comprising a heavy chain variable domain (VH) that binds LRP5 and a light chain variable domain (VL) that binds LRP5,
(2) an Fc region, or fragment thereof comprising the CH3,
(3) a VH that binds FZD4, and
(4) a constant heavy chain domain 1 (CH1),
wherein
(i) the VH that binds LRP5 comprises heavy chain CDRs (CDR-H1, CDR-H2 and CDR-H3), of an antibody set forth in the sequences in Table 3 or Table 6, and
(ii) the VL that binds LRP5 comprises light chain CDRs (CDR-L1, CDR-L2 and CDR-L3), of an antibody set forth in the sequences in Table 3 or Table 6,
(iii) the VH that binds FZD4, comprises the heavy chain CDRs (CDR-H1, CDR-H2 and CDR-H3), of an antibody set forth in the sequences in Table 1, Table 2 or Table 6,
and
(b) a third and fourth light chain monomer each comprising a VL that binds FZD4, and a constant light chain domain 1 (CL1), the VL that binds FZD4, comprising the light chain CDRs (CDR-L1, CDR-L2 and CDR-L3), of an antibody set forth in the sequences in Table 1, Table 2 or Table 6,
wherein the first and second heavy chain monomer dimerize via their Fc regions and the VL and VH that bind LRP5 of the first monomer pair with the VH and VL that bind LRP5 of the second monomer forming a bivalent diabody that binds LRP5, and
the CL1 and VLs that bind FZD4, of the third and fourth light chain monomers pair with the CH1 and VHs that bind FZD4, of the first and second heavy chain monomers forming two Fabs that bind FZD4, wherein the diabody forms the N-terminal bivalent LRP5 binding domain and the two Fabs form the C-terminal bivalent FZD4, binding domain.

29. The tetravalent binding antibody molecule of claim 7 comprising,
(a) a dimer of a first and second heavy chain monomer, each monomer comprising a single-chain polypeptide comprising, from N-terminus to C-terminus:
(1) a VH that binds FZD4
(2) an Fc region, or fragment thereof comprising the CH3,
(3), a peptide comprising a VH that binds LRP5 and a VL that binds LRP5 and
(4) a constant heavy chain domain 1 (CH1),
wherein
(i) the VH that binds LRP5 comprises heavy chain CDRs (CDR-H1, CDR-H2 and CDR-H3), of an antibody set forth in the sequences in Table 3 or Table 6, and
(ii) the VL that binds LRP5 comprises light chain CDRs (CDR-L1, CDR-L2 and CDR-L3), of an antibody set forth in the sequences in Table 3 or Table 6,
(iii) the VH that binds FZD4, comprises the heavy chain CDRs (CDR-H1, CDR-H2 and CDR-H3), of an antibody set forth in the sequences in Table 1, Table 2 or Table 6,
and
(b) a third and fourth light chain monomer each comprising from N terminus to C terminus a VL that binds FZD4, and a constant light chain domain 1 (CL1), the VL that binds FZD4, comprising the light chain CDRs (CDR-L1, CDR-L2 and CDR-L3), of an antibody set forth in the sequences in Table 1, Table 2 or Table 6,
wherein the first and second heavy chain monomer dimerize via their Fc regions and the VL and VH that bind LRP5 of the first monomer pair with the VH and VL that bind LRP5 of the second monomer forming a bivalent diabody that binds LRP5, and
the CL1 and VLs that bind FZD4, of the third and fourth light chain monomers pair with the CH1 and VHs that bind FZD4, of the first and second heavy chain monomers forming two Fabs that bind FZD4, wherein the diabody forms the C-terminal bivalent LRP5 binding domain and the two Fabs form the N-terminal bivalent FZD4, binding domain.

30. (canceled)

31. The tetravalent binding antibody molecule of claim 28, wherein
in the first heavy chain monomer
(a) the CDR-H1 and CDR-H2 of the VH that binds LRP5 comprise respectively FSSSSI (SEQ ID NO: 528) and SISSSYGYTY (SEQ ID NO: 553), or the CDR-H1 and CDR-H2 of the VH that binds LRP5 comprise respectively LSYYYM (SEQ ID NO: 527) and SIYSSYGYTY (SEQ ID NO: 552) and
(b) the CDR-L2 and CDR-L3 of the VL that binds LRP5 comprise respectively SASDLYS (SEQ ID NO: 491) and YAGAGLI (SEQ ID NO: 510), or the CDR-L2 and CDR-L3 of the VL that binds LRP5 comprise respectively SASSLYS (SEQ ID NO: 2) and SSYSLI (SEQ ID NO: 130), and
in the second heavy chain monomer
(c) the CDR-H1 and CDR-H2 of the VH that binds LRP5 comprises respectively FTAYAM (SEQ ID NO: 536) and SIYPSGGYTA (SEQ ID NO: 566), or the CDR-H1 and CDR-H2 of the VH that binds LRP5 comprises respectively FSSSSI (SEQ ID NO: 528) and SISSSYGYTY (SEQ ID NO: 553) and
(d) the CDR-L2 and the CDR-L3 of the VL that binds LRP5 comprises respectively SASSLYS (SEQ ID NO: 2) and YWAYYSPI (SEQ ID NO: 493), or the CDR-L2 and the CDR-L3 of the VL that binds LRP5 comprises respectively SASSLYS (SEQ ID NO: 2) and ASYAPI (SEQ ID NO: 492).

32. The tetravalent binding antibody molecule of claim 28, wherein in the first and second heavy chain monomer the CDR-H1 and CDR-H2 of the VH that binds FZD4 comprises respectively LSSYSM (SEQ ID NO: 24) and YISSYYGYTY (SEQ ID NO: 51), or the CDR-H1 and CDR-H2 of the VH that binds FZD4 comprises respectively LSSYSM (SEQ ID NO: 24) and YISSYDSITD (SEQ ID NO: 61).

33. The tetravalent binding antibody molecule of claim 28, wherein in the third and fourth light chain monomers the CDR-L1 and CDR-L2 of the VL that bind FZD4 comprise respectively SVSSA (SEQ ID NO: 1) and SASSLYS (SEQ ID NO: 2), and the CDR-L3 of the VL that binds FZD4 comprises WYYAPI (SEQ ID NO: 3) or WYNAPI (SEQ ID NO: 12).

34. The tetravalent binding antibody molecule of claim 28, comprising a bivalent, bispecific LRP5 binding domain, wherein
(a) in the first heavy chain monomer,
the VH that binds LRP-5 comprises CDR-H1 of SEQ ID NO: 528, CDR-H2 of SEQ ID NO: 553 and CDR-H3 of SEQ ID NO: 586, and the VL that binds LRP-5 comprises CDR-L1 of SEQ ID NO: 1, CDR-L2 of SEQ ID NO: 491 and CDR-L3 of SEQ ID NO: 510 of ANT16-Hole of Table 6A, or
the VH that binds LRP-5 comprises CDR-H1 of SEQ ID NO: 527, CDR-H2 of SEQ ID NO: 552 and CDR-H3 of SEQ ID NO: 584 and the VL that binds LRP-5 comprises CDR-L1 of SEQ ID NO: 1, CDR-L2 of SEQ ID NO: 2 and CDR-L3 of SEQ ID NO: 130 of ANT18-Hole of Table 6A, or
the VH that binds LRP-5 comprises CDR-H1 of SEQ ID NO: 527, CDR-H2 of SEQ ID NO: 552 and CDR-H3 of SEQ ID NO: 584 and the VL that binds LRP-5 comprises CDR-L1 of SEQ ID NO: 1, CDR-L2 of SEQ ID NO: 491 and CDR-L3 of SEQ ID NO: 510 of ANT20-Hole of Table 6A, or
the VH that binds LRP-5 comprises CDR-H1 of SEQ ID NO: 528, CDR-H2 of SEQ ID NO: 553 and CDR-H3 of SEQ ID NO: 586 and the VL that binds LRP-5 comprises CDR-L1 of SEQ ID NO: 1, CDR-L2 of SEQ ID NO: 2 and CDR-L3 of SEQ ID NO: 130 of ANT21-Hole of Table 6A, or
the VH that binds LRP-5 comprises CDR-H1 of SEQ ID NO: 527, CDR-H2 of SEQ ID NO: 552 and CDR-H3 of SEQ ID NO: 584 and the VL that binds LRP-5 comprises CDR-L1 of SEQ ID NO: 1, CDR-L2 of SEQ ID NO: 2 and CDR-L3 of SEQ ID NO: 130 of ANT36-Hole of Table 6A, or
the VH that binds LRP-5 comprises CDR-H1 of SEQ ID NO: 528, CDR-H2 of SEQ ID NO: 553 and CDR-H3 of SEQ ID NO: 586 and the VL that binds LRP-5 comprises CDR-L1 of SEQ ID NO: 1, CDR-L2 of SEQ ID NO: 491 and CDR-L3 of SEQ ID NO: 510 of ANT39-Hole of Table 6A,
and
the VH that binds FZD4 comprises the FZD4 VH CDRs CDR-H1 of SEQ ID NO: 24, a CDR-H2 of SEQ ID NO: 51 and a CDR-H3 of SEQ ID NO: 79 of ANT16 Hole of Table 6B, or
the VH that binds FZD4 comprises the FZD4 VH CDRs CDR-H1 of SEQ ID NO: 24, a CDR-H2 of SEQ ID NO: 51 and a CDR-H3 of SEQ ID NO: 79 of ANT18-Hole of Table 6B, or
the VH that binds FZD4 comprises the FZD4 VH CDRs CDR-H1 of SEQ ID NO: 24, a CDR-H2 of SEQ ID NO: 51 and a CDR-H3 of SEQ ID NO: 79 of ANT20-Hole of Table 6B, or
the VH that binds FZD4 comprises the FZD4 VH CDRs CDR-H1 of SEQ ID NO: 24, a CDR-H2 of SEQ ID NO: 51 and a CDR-H3 of SEQ ID NO: 79 of ANT21-Hole of Table 6B, or
the VH that binds FZD4 comprises the FZD4 VH CDRs CDR-H1 of SEQ ID NO: 24, a CDR-H2 of SEQ ID NO: 61 and a CDR-H3 of SEQ ID NO: 90 of ANT36-Hole of Table 6B, or
the VH that binds FZD4 comprises the FZD4 VH CDRs CDR-H1 of SEQ ID NO: 24, a CDR-H2 of SEQ ID NO: 61 and a CDR-H3 of SEQ ID NO: 90 of ANT39-Hole of Table 6B,
wherein the FZD CDR-L1 and CDR-L2 are respectively SVSSA (SEQ ID NO: 1) and SASSLYS (SEQ ID NO: 2), and
(b) in the second heavy chain monomer
the VH that binds LRP5 comprises CDR-H1 of SEQ ID NO: 536, CDR-H2 of SEQ ID NO: 566 and CDR-H3 of SEQ ID NO: 603 and the VL that binds LRP5 comprises CDR-L1 of SEQ ID NO: 1, CDR-L2 of SEQ ID NO: 2 and CDR-L3 of SEQ ID NO: 493 of ANT16-Knob of Table 6A, or
the VH that binds LRP5 comprises CDR-H1 of SEQ ID NO: 528, CDR-H2 of SEQ ID NO: 553 and CDR-H3 of SEQ ID NO: 585 and the VL that binds LRP5 comprises CDR-L1 of SEQ ID NO: 1, CDR-L2 of SEQ ID NO: 2 and CDR-L3 of SEQ ID NO: 492 of ANT18-Knob of Table 6A, or
the VH that binds LRP5 comprises CDR-H1 of SEQ ID NO: 536, CDR-H2 of SEQ ID NO: 566 and CDR-H3 of SEQ ID NO: 603 and the VL that binds LRP5 comprises CDR-L1 of SEQ ID NO: 1, CDR-L2 of SEQ ID NO: 2 and CDR-L3 of SEQ ID NO: 492 of ANT20-Knob of Table 6A, or
the VH that binds LRP5 comprises CDR-H1 of SEQ ID NO: 528, CDR-H2 of SEQ ID NO: 553 and CDR-H3 of SEQ ID NO: 585 and the VL that binds LRP5 comprises CDR-L1 of SEQ ID NO: 1, CDR-L2 of SEQ ID NO: 2 and CDR-L3 of SEQ ID NO: 493 of ANT21-Knob of Table 6A, or
the VH that binds LRP5 comprises CDR-H1 of SEQ ID NO: 528, CDR-H2 of SEQ ID NO: 553 and CDR-H3 of SEQ ID NO: 585 and the VL that binds LRP5 comprises CDR-L1 of SEQ ID NO: 1, CDR-L2 of SEQ ID NO: 2 and CDR-L3 of SEQ ID NO: 492 of ANT36-Knob of Table 6A,
or the VH that binds LRP5 comprises CDR-H1 of SEQ ID NO: 536, CDR-H2 of SEQ ID NO: 566 and CDR-H3 of SEQ ID NO: 603 and the VL that binds LRP5 comprises CDR-L1 of SEQ ID NO: 1, CDR-L2 of SEQ ID NO: 2 and CDR-L3 of SEQ ID NO: 493 of ANT39-Knob of Table 6A,
and the VH that binds FZD4 comprises,
FZD4 Fab CDR-H1 of SEQ ID NO: 24, a CDR-H2 of SEQ ID NO: 51 and a CDR-H3 of SEQ ID NO: 79 of ANT16 Knob of Table 6B, or
FZD4 Fab CDR-H1 of SEQ ID NO: 24, a CDR-H2 of SEQ ID NO: 51 and a CDR-H3 of SEQ ID NO: 79 of ANT18 Knob of Table 6B, or
FZD4 Fab CDR-H1 of SEQ ID NO: 24, a CDR-H2 of SEQ ID NO: 51 and a CDR-H3 of SEQ ID NO: 79 of ANT20 Knob of Table 6B, or
FZD4 Fab CDR-H1 of SEQ ID NO: 24, a CDR-H2 of SEQ ID NO: 51 and a CDR-H3 of SEQ ID NO: 79 of ANT21 Knob of Table 6B, or
FZD4 Fab CDR-H1 of SEQ ID NO: 24, a CDR-H2 of SEQ ID NO: 61 and a CDR-H3 of SEQ ID NO: 90 of ANT36 Knob of Table 6B, or
FZD4 Fab CDR-H1 of SEQ ID NO: 24, a CDR-H2 of SEQ ID NO: 61 and a CDR-H3 of SEQ ID NO: 90 of ANT39 Knob of Table 6B,
and
(c) in each of the third and fourth light chain monomers
the VL comprises the FZD4 Fab CDR-L1, CDR-L2 and CDR-L3 of SEQ ID NO: 3 of ANT16-Knob of Table 6B, or
the VL comprises the FZD4 Fab CDR-L1, CDR-L2 and CDR-L3 of SEQ ID NO: 3 of ANT18-Knob of Table 6B, or
the VL comprises the FZD4 Fab CDR-L1, CDR-L2 and CDR-L3 of SEQ ID NO: 3 of ANT20-Knob of Table 6B, or
the VL comprises the FZD4 Fab CDR-L1, CDR-L2 and CDR-L3 of SEQ ID NO: 3 of ANT21-Knob of Table 6B, or
the VL comprises the FZD4 Fab CDR-L1, CDR-L2 and CDR-L3 of SEQ ID NO: 12 of ANT36-Knob of Table 6B, or
the VL comprises the FZD4 Fab CDR-L1, CDR-L2 and CDR-L3 of SEQ ID NO: 12 of ANT39-Knob of Table 6B,
wherein the FZD4 Fab CDR-L1 comprises SVSSA (SEQ ID NO: 1) and CDR-L2 comprises SASSLYS (SEQ ID NO: 2).

35-36. (canceled)

37. The tetravalent binding antibody molecule of claim 1, wherein the tetravalent binding antibody molecule comprises
(a) a first heavy chain monomer comprising the amino acid sequence of the hole heavy chain construct of SEQ ID NO: 898, a second heavy chain monomer comprising the amino acid of the knob heavy chain construct of SEQ ID NO: 897 and a light chain monomer comprising the amino acid sequence of the light chain construct of SEQ ID NO: 899 wherein the amino acid sequence of the CDRs are the amino acid sequence of the CDRs of ANT16; or
(b) a first heavy chain monomer comprising the amino acid sequence of the hole heavy chain construct of SEQ ID NO: 901, a second heavy chain monomer comprising the amino acid of the knob heavy chain construct of SEQ ID NO: 900 and a light chain monomer comprising the amino acid sequence of the light chain construct of SEQ ID NO: 902 wherein the amino acid sequence of the CDRs are the amino acid sequence of the CDRs of ANT 18; or
(c) a first heavy chain monomer comprising the amino acid sequence of the hole heavy chain construct of SEQ ID NO: 904, a second heavy chain monomer comprising the amino acid of the knob heavy chain construct of SEQ ID NO: 903 and a light chain monomer comprising the amino acid sequence of the light chain construct of SEQ ID NO: 902 wherein the amino acid sequence of the CDRs are the amino acid sequence of the CDRs of ANT20; or
(d) a first heavy chain monomer comprising the amino acid sequence of the hole heavy chain construct of SEQ ID NO: 906, a second heavy chain monomer comprising the amino acid of the knob heavy chain construct of SEQ ID NO: 905 and a light chain monomer comprising the amino acid sequence of the light chain construct of SEQ ID NO: 902 wherein the amino acid sequence of the CDRs are the amino acid sequence of the CDRs of ANT21; or
(e) a first heavy chain monomer comprising the amino acid sequence of the hole heavy chain construct of SEQ ID NO: 908, a second heavy chain monomer comprising the amino acid of the knob heavy chain construct of SEQ ID NO: 907 and a light chain monomer comprising the amino acid sequence of the light chain construct of SEQ ID NO: 909 wherein the amino acid sequence of the CDRs are the amino acid sequence of the CDRs of ANT39; or
(f) a first heavy chain monomer comprising the amino acid sequence of the hole heavy chain construct selected from the group consisting of SEQ ID NO: 921; SEQ ID NO: 922; SEQ ID NO: 923; SEQ ID NO: 924; SEQ ID NO: 925; SEQ ID NO: 926; SEQ ID NO: 927; and SEQ ID NO: 928; a second heavy chain monomer comprising the amino acid of a knob heavy chain construct selected from the group consisting of SEQ ID NO: 929; SEQ ID NO: 930; SEQ ID NO: 931; SEQ ID NO: 932; SEQ ID NO: 933; SEQ ID NO: 934; SEQ ID NO: 935; and SEQ ID NO: 936; and a light chain monomer comprising the amino acid sequence of the light chain construct selected from the group consisting of SEQ ID NO: 909 and SEQ ID NO: 952.

38. (canceled)

39. A pharmaceutical composition comprising a tetravalent binding antibody molecule of claim 1 and a pharmaceutically acceptable carrier.

40-42. (canceled)

43. A method for increasing retinal or brain endothelial cell barrier functions, decreasing endothelial cell permeability, enhancing or restoring blood retina and blood brain barrier maintenance in a subject in need thereof comprising contacting an endothelial cell comprising an FZD4 receptor and an LRP5 in a subject in need thereof with an effective amount of a tetravalent binding antibody molecule claim 1.

44.-51. (canceled)

52. A method of treating or preventing an ocular disorder e.g. a disorder of the retina or macula e.g. selected from diabetic retinopathy, retinopathy of prematurity, Coats' disease, FEVR, Norrie disease, macular degeneration, diabetic macular edema and pediatric vitreoretinopathies or in the treatment or prevention of a disorder selected from Alzheimer's disease, epilepsy, multiple sclerosis, stroke and ischemia comprising administering to a person in need thereof a therapeutically effective amount of the tetravalent binding antibody molecule of claim 1.

53. (canceled)

54. A nucleic acid molecule encoding a polypeptide of the tetravalent binding antibody molecule of claim 1.

55. The nucleic acid molecule according to claim 54 wherein the nucleic acid molecule encodes a polypeptide comprising a heavy chain monomer of the tetravalent binding antibody molecule.

56. The nucleic acid molecule according to claim 55 wherein nucleic acid molecule comprises a sequence which has at least 70% identity, such as 75% identity, such as 80% identity, such as 85% identity, such as 90% identity, such as 91% identity, such as 92% identity, such as 93% identity, such as 94% identity, such as 95% identity, such as 96% identity, such as 97% identity, such as 98% identity, such as 99% identity, to any one of SEQ ID NOs: 1030 to 1061.

57-58. (canceled)

59. The nucleic acid molecule according to claim 54 wherein the nucleic acid molecule encodes a polypeptide comprising a light chain monomer of the tetravalent binding antibody molecule.

60. The nucleic acid molecule according to claim 59 wherein nucleic acid molecule comprises a sequence which has at least 70% identity, such as 75% identity, such as 80% identity, such as 85% identity, such as 90% identity, such as 91% identity, such as 92% identity, such as 93% identity, such as 94% identity, such as 95% identity, such as 96% identity, such as 97% identity, such as 98% identity, such as 99% identity, to SEQ ID NO: 1062 or 1063.

61-62. (canceled)

63. A set of one or more polynucleotides wherein each polynucleotide encodes at least one of the monomer chains of the tetravalent binding antibody molecule of claim 1, such that all four chains of said tetravalent binding antibody molecule are encoded.

64. A vector comprising the nucleic acid of claim 54.

65. (canceled)

66. A set of one or more vectors which collectively comprise the set of one or more polynucleotides of claim 63, such that all four chains of said tetravalent binding antibody molecule are encoded in the set of vectors.

67. (canceled)

68. A host cell expressing the vector of claim 64.

69. A pharmaceutical composition comprising the nucleic acid molecule according to claim 54, and a pharmaceutical acceptable carrier, diluent or excipient.

70. A process for the production of a tetravalent binding antibody molecule of claim 1 by expression from a vector or set of vectors.

71. A polypeptide comprising a chain monomer of the tetravalent binding antibody molecule of claim 1.

72.-77. (canceled)

The application's sequence listing, which the Patent Office published only in electronic form, follows.

SEQUENCE LISTING (1063 sequences)

SEQ ID NO: 1 - protein, 5 aa, Artificial Sequence
  Description of Artificial Sequence: Synthetic peptide
SVSSA

SEQ ID NO: 2 - protein, 7 aa, Artificial Sequence
  Description of Artificial Sequence: Synthetic peptide
SASSLYS

SEQ ID NO: 3 - protein, 6 aa, Artificial Sequence
  Description of Artificial Sequence: Synthetic peptide
WYYAPI

SEQ ID NO: 4 - protein, 6 aa, Artificial Sequence
  Description of Artificial Sequence: Synthetic peptide
GNYGPI

SEQ ID NO: 5 - protein, 6 aa, Artificial Sequence
  Description of Artificial Sequence: Synthetic peptide
GYYAPI

SEQ ID NO: 6 - protein, 6 aa, Artificial Sequence
  Description of Artificial Sequence: Synthetic peptide
GYYALI

SEQ ID NO: 7 - protein, 6 aa, Artificial Sequence
  Description of Artificial Sequence: Synthetic peptide
WYFAPI

SEQ ID NO: 8 - protein, 6 aa, Artificial Sequence
  Description of Artificial Sequence: Synthetic peptide
GYNAPI

SEQ ID NO: 9 - protein, 6 aa, Artificial Sequence
  Description of Artificial Sequence: Synthetic peptide
GYFAPI

SEQ ID NO: 10 - protein, 6 aa, Artificial Sequence
  Description of Artificial Sequence: Synthetic peptide
WFNAPI

SEQ ID NO: 11 - protein, 6 aa, Artificial Sequence
  Description of Artificial Sequence: Synthetic peptide
SNYAPI

SEQ ID NO: 12 - protein, 6 aa, Artificial Sequence
  Description of Artificial Sequence: Synthetic peptide
WYNAPI

SEQ ID NO: 13 - protein, 6 aa, Artificial Sequence
  Description of Artificial Sequence: Synthetic peptide
GFYAPI

SEQ ID NO: 14 - protein, 6 aa, Artificial Sequence
  Description of Artificial Sequence: Synthetic peptide
GYSAPI

SEQ ID NO: 15 - protein, 6 aa, Artificial Sequence
  Description of Artificial Sequence: Synthetic peptide
GYAGLI

SEQ ID NO: 16 - protein, 6 aa, Artificial Sequence
  Description of Artificial Sequence: Synthetic peptide
GFSSPI

SEQ ID NO: 17 - protein, 6 aa, Artificial Sequence
  Description of Artificial Sequence: Synthetic peptide
GHYAPI

SEQ ID NO: 18 - protein, 6 aa, Artificial Sequence
  Description of Artificial Sequence: Synthetic peptide
SFYAPI

SEQ ID NO: 19 - protein, 6 aa, Artificial Sequence
  Description of Artificial Sequence: Synthetic peptide
GYRAPI

SEQ ID NO: 20 - protein, 6 aa, Artificial Sequence
  Description of Artificial Sequence: Synthetic peptide
WHRAPI

SEQ ID NO: 21 - protein, 6 aa, Artificial Sequence
  Description of Artificial Sequence: Synthetic peptide
GDFAPF

SEQ ID NO: 22 - protein, 6 aa, Artificial Sequence
  Description of Artificial Sequence: Synthetic peptide
GYSSPI

SEQ ID NO: 23 - protein, 6 aa, Artificial Sequence
  Description of Artificial Sequence: Synthetic peptide
WFYAPI

SEQ ID NO: 24 - protein, 6 aa, Artificial Sequence
  Description of Artificial Sequence: Synthetic peptide
LSSYSM

SEQ ID NO: 25 - protein, 6 aa, Artificial Sequence
  Description of Artificial Sequence: Synthetic peptide
IAFYSI

SEQ ID NO: 26 - protein, 6 aa, Artificial Sequence
  Description of Artificial Sequence: Synthetic peptide
IYSYSI

SEQ ID NO: 27 - protein, 6 aa, Artificial Sequence
  Description of Artificial Sequence: Synthetic peptide
ISSYSI

SEQ ID NO: 28 - protein, 6 aa, Artificial Sequence
  Description of Artificial Sequence: Synthetic peptide
ISAYSI

SEQ ID NO: 29 - protein, 6 aa, Artificial Sequence
  Description of Artificial Sequence: Synthetic peptide
LSSYSI

SEQ ID NO: 30 - protein, 6 aa, Artificial Sequence
  Description of Artificial Sequence: Synthetic peptide
LYSYSM

SEQ ID NO: 31 - protein, 6 aa, Artificial Sequence
  Description of Artificial Sequence: Synthetic peptide
LTSYSM

SEQ ID NO: 32 - protein, 6 aa, Artificial Sequence
  Description of Artificial Sequence: Synthetic peptide
ISSYSM

SEQ ID NO: 33 - protein, 6 aa, Artificial Sequence
  Description of Artificial Sequence: Synthetic peptide
LFSYPM

SEQ ID NO: 34 - protein, 6 aa, Artificial Sequence
  Description of Artificial Sequence: Synthetic peptide
LSAYSM

SEQ ID NO: 35 - protein, 6 aa, Artificial Sequence
  Description of Artificial Sequence: Synthetic peptide
ISSHSM

SEQ ID NO: 36 - protein, 6 aa, Artificial Sequence
  Description of Artificial Sequence: Synthetic peptide
ISAYAM

SEQ ID NO: 37 - protein, 6 aa, Artificial Sequence
  Description of Artificial Sequence: Synthetic peptide
ISTYSM

SEQ ID NO: 38 - protein, 6 aa, Artificial Sequence
  Description of Artificial Sequence: Synthetic peptide
LHAFSM

SEQ ID NO: 39 - protein, 6 aa, Artificial Sequence
  Description of Artificial Sequence: Synthetic peptide
ISGYSI

SEQ ID NO: 40 - protein, 6 aa, Artificial Sequence
  Description of Artificial Sequence: Synthetic peptide
ISNYSI

SEQ ID NO: 41 - protein, 6 aa, Artificial Sequence
  Description of Artificial Sequence: Synthetic peptide
ISAYSM

SEQ ID NO: 42 - protein, 6 aa, Artificial Sequence
  Description of Artificial Sequence: Synthetic peptide
LTSYAM

SEQ ID NO: 43 - protein, 6 aa, Artificial Sequence
  Description of Artificial Sequence: Synthetic peptide
LYSYSI

SEQ ID NO: 44 - protein, 6 aa, Artificial Sequence
  Description of Artificial Sequence: Synthetic peptide
LSSFSM

SEQ ID NO: 45 - protein, 6 aa, Artificial Sequence
  Description of Artificial Sequence: Synthetic peptide
IASYSI

SEQ ID NO: 46 - protein, 6 aa, Artificial Sequence
  Description of Artificial Sequence: Synthetic peptide
IHSNSM

SEQ ID NO: 47 - protein, 6 aa, Artificial Sequence
  Description of Artificial Sequence: Synthetic peptide
LSTNSM

SEQ ID NO: 48 - protein, 6 aa, Artificial Sequence
  Description of Artificial Sequence: Synthetic peptide
LHSFSM

SEQ ID NO: 49 - protein, 6 aa, Artificial Sequence
  Description of Artificial Sequence: Synthetic peptide
ISSFSI

SEQ ID NO: 50 - protein, 6 aa, Artificial Sequence
  Description of Artificial Sequence: Synthetic peptide
LPYYSM

SEQ ID NO: 51 - protein, 10 aa, Artificial Sequence
  Description of Artificial Sequence: Synthetic peptide
YISSYYGYTY

SEQ ID NO: 52 - protein, 10 aa, Artificial Sequence
  Description of Artificial Sequence: Synthetic peptide
YISPFSGITH

SEQ ID NO: 53 - protein, 10 aa, Artificial Sequence
  Description of Artificial Sequence: Synthetic peptide
YISPYYSYTY

SEQ ID NO: 54 - protein, 10 aa, Artificial Sequence
  Description of Artificial Sequence: Synthetic peptide
YISSYAGYTS

SEQ ID NO: 55 - protein, 10 aa, Artificial Sequence
  Description of Artificial Sequence: Synthetic peptide
YISPYFGLTG

SEQ ID NO: 56 - protein, 10 aa, Artificial Sequence
  Description of Artificial Sequence: Synthetic peptide
FISSFYGYTD

SEQ ID NO: 57 - protein, 10 aa, Artificial Sequence
  Description of Artificial Sequence: Synthetic peptide
YISSYYGSTY

SEQ ID NO: 58 - protein, 10 aa, Artificial Sequence
  Description of Artificial Sequence: Synthetic peptide
YISSYYSYTY

SEQ ID NO: 59 - protein, 10 aa, Artificial Sequence
  Description of Artificial Sequence: Synthetic peptide
YISPYYGYTN

SEQ ID NO: 60 - protein, 10 aa, Artificial Sequence
  Description of Artificial Sequence: Synthetic peptide
YISPFFSFTH

SEQ ID NO: 61 - protein, 10 aa, Artificial Sequence
  Description of Artificial Sequence: Synthetic peptide
YISSYDSITD

SEQ ID NO: 62 - protein, 10 aa, Artificial Sequence
  Description of Artificial Sequence: Synthetic peptide
YISSYYSYTA

SEQ ID NO: 63 - protein, 10 aa, Artificial Sequence
  Description of Artificial Sequence: Synthetic peptide
YISPYYGYTF

SEQ ID NO: 64 - protein, 10 aa, Artificial Sequence
  Description of Artificial Sequence: Synthetic peptide
YISPHYGFTS

SEQ ID NO: 65 - protein, 10 aa, Artificial Sequence
  Description of Artificial Sequence: Synthetic peptide
YISPYYGYTY

SEQ ID NO: 66 - protein, 10 aa, Artificial Sequence
  Description of Artificial Sequence: Synthetic peptide
YISSYYGYTF

SEQ ID NO: 67 - protein, 10 aa, Artificial Sequence
  Description of Artificial Sequence: Synthetic peptide
IISSNFGYTS

SEQ ID NO: 68 - protein, 10 aa, Artificial Sequence
  Description of Artificial Sequence: Synthetic peptide
SISSYYGFTS

SEQ ID NO: 69 - protein, 10 aa, Artificial Sequence
  Description of Artificial Sequence: Synthetic peptide
YISPSYGSTY

SEQ ID NO: 70 - protein, 10 aa, Artificial Sequence
  Description of Artificial Sequence: Synthetic peptide
YISSFNGSTF

SEQ ID NO: 71 - protein, 10 aa, Artificial Sequence
  Description of Artificial Sequence: Synthetic peptide
YISPYYSFTS

SEQ ID NO: 72 - protein, 10 aa, Artificial Sequence
  Description of Artificial Sequence: Synthetic peptide
YISPYYSFTY

SEQ ID NO: 73 - protein, 10 aa, Artificial Sequence
  Description of Artificial Sequence: Synthetic peptide
FISSYYGYTY

SEQ ID NO: 74 - protein, 10 aa, Artificial Sequence
  Description of Artificial Sequence: Synthetic peptide
SISPYYSYTN

SEQ ID NO: 75 - protein, 10 aa, Artificial Sequence
  Description of Artificial Sequence: Synthetic peptide
FINPYYSYTY

SEQ ID NO: 76 - protein, 10 aa, Artificial Sequence
  Description of Artificial Sequence: Synthetic peptide
YISSYYDYTY

SEQ ID NO: 77 - protein, 10 aa, Artificial Sequence
  Description of Artificial Sequence: Synthetic peptide
IISSYFGFTY

SEQ ID NO: 78 - protein, 10 aa, Artificial Sequence
  Description of Artificial Sequence: Synthetic peptide
YISSNFGSTY

SEQ ID NO: 79 - protein, 8 aa, Artificial Sequence
  Description of Artificial Sequence: Synthetic peptide
PAPGHWGF

SEQ ID NO: 80 - protein, 8 aa, Artificial Sequence
  Description of Artificial Sequence: Synthetic peptide
PAVGHLAM

SEQ ID NO: 81 - protein, 8 aa, Artificial Sequence
  Description of Artificial Sequence: Synthetic peptide
STVGHGGM

SEQ ID NO: 82 - protein, 8 aa, Artificial Sequence
  Description of Artificial Sequence: Synthetic peptide
PAPAHWGF

SEQ ID NO: 83 - protein, 8 aa, Artificial Sequence
  Description of Artificial Sequence: Synthetic peptide
PALGHAGM

SEQ ID NO: 84 - protein, 8 aa, Artificial Sequence
  Description of Artificial Sequence: Synthetic peptide
PAPGHWGM

SEQ ID NO: 85 - protein, 8 aa, Artificial Sequence
  Description of Artificial Sequence: Synthetic peptide
PVAGHGGM

SEQ ID NO: 86 - protein, 8 aa, Artificial Sequence
  Description of Artificial Sequence: Synthetic peptide
PAVGHLAL

SEQ ID NO: 87 - protein, 8 aa, Artificial Sequence
  Description of Artificial Sequence: Synthetic peptide
PAPGYGAL

SEQ ID NO: 88 - protein, 8 aa, Artificial Sequence
  Description of Artificial Sequence: Synthetic peptide
QTAGHAGM

SEQ ID NO: 89 - protein, 8 aa, Artificial Sequence
  Description of Artificial Sequence: Synthetic peptide
QAPGVSGI

SEQ ID NO: 90 - protein, 8 aa, Artificial Sequence
  Description of Artificial Sequence: Synthetic peptide
PAVGHMAF

SEQ ID NO: 91 - protein, 8 aa, Artificial Sequence
  Description of Artificial Sequence: Synthetic peptide
PTPGHGGL

SEQ ID NO: 92 - protein, 8 aa, Artificial Sequence
  Description of Artificial Sequence: Synthetic peptide
PAPGHGGM

SEQ ID NO: 93 - protein, 8 aa, Artificial Sequence
  Description of Artificial Sequence: Synthetic peptide
PAVGHLGM

SEQ ID NO: 94 - protein, 8 aa, Artificial Sequence
  Description of Artificial Sequence: Synthetic peptide
PAPGHWGL

SEQ ID NO: 95 - protein, 8 aa, Artificial Sequence
  Description of Artificial Sequence: Synthetic peptide
TAPGHGAF

SEQ ID NO: 96 - protein, 8 aa, Artificial Sequence
  Description of Artificial Sequence: Synthetic peptide
PALGHLAM

SEQ ID NO: 97 - protein, 8 aa, Artificial Sequence
  Description of Artificial Sequence: Synthetic peptide
LAPGHPAL

SEQ ID NO: 98 - protein, 8 aa, Artificial Sequence
  Description of Artificial Sequence: Synthetic peptide
PAAGHLAL

SEQ ID NO: 99 - protein, 8 aa, Artificial Sequence
  Description of Artificial Sequence: Synthetic peptide
PIPGHLAF

SEQ ID NO: 100 - protein, 8 aa, Artificial Sequence
  Description of Artificial Sequence: Synthetic peptide
PTWAHGAF

SEQ ID NO: 101 - protein, 8 aa, Artificial Sequence
  Description of Artificial Sequence: Synthetic peptide
PVLAHSAF

SEQ ID NO: 102 - protein, 8 aa, Artificial Sequence
  Description of Artificial Sequence: Synthetic peptide
QTPGHSGM

SEQ ID NO: 103 - protein, 8 aa, Artificial Sequence
  Description of Artificial Sequence: Synthetic peptide
QAPGPWGM

SEQ ID NO: 104 - protein, 8 aa, Artificial Sequence
  Description of Artificial Sequence: Synthetic peptide
PAPGHGAF

SEQ ID NO: 105 - protein, 8 aa, Artificial Sequence
  Description of Artificial Sequence: Synthetic peptide
PTTAHMAL

SEQ ID NO: 106 - protein, 8 aa, Artificial Sequence
  Description of Artificial Sequence: Synthetic peptide
PTPGHSGF

SEQ ID NO: 107 - protein, 8 aa, Artificial Sequence
  Description of Artificial Sequence: Synthetic peptide
PAVGHGAL

SEQ ID NO: 108 - protein, 8 aa, Artificial Sequence
  Description of Artificial Sequence: Synthetic peptide
TAPGHPAM

SEQ ID NO: 109 - protein, 8 aa, Artificial Sequence
  Description of Artificial Sequence: Synthetic peptide
PVPAHGAF

SEQ ID NO: 110 - protein, 6 aa, Artificial Sequence
  Description of Artificial Sequence: Synthetic peptide
ASYYLI

SEQ ID NO: 111 - protein, 6 aa, Artificial Sequence
  Description of Artificial Sequence: Synthetic peptide
SNYALI

SEQ ID NO: 112 - protein, 6 aa, Artificial Sequence
  Description of Artificial Sequence: Synthetic peptide
SSSFLI

SEQ ID NO: 113 - protein, 6 aa, Artificial Sequence
  Description of Artificial Sequence: Synthetic peptide
SSDSLI

SEQ ID NO: 114 - protein, 6 aa, Artificial Sequence
  Description of Artificial Sequence: Synthetic peptide
STHFLI

SEQ ID NO: 115 - protein, 6 aa, Artificial Sequence
  Description of Artificial Sequence: Synthetic peptide
ASYSLI

SEQ ID NO: 116 - protein, 6 aa, Artificial Sequence
  Description of Artificial Sequence: Synthetic peptide
SAYTLI

SEQ ID NO: 117 - protein, 6 aa, Artificial Sequence
  Description of Artificial Sequence: Synthetic peptide
SSVSLI

SEQ ID NO: 118 - protein, 6 aa, Artificial Sequence
  Description of Artificial Sequence: Synthetic peptide
SYYSLI

SEQ ID NO: 119 - protein, 6 aa, Artificial Sequence
  Description of Artificial Sequence: Synthetic peptide
SSYYLI

SEQ ID NO: 120 - protein, 6 aa, Artificial Sequence
  Description of Artificial Sequence: Synthetic peptide
AYYFLI

SEQ ID NO: 121 - protein, 6 aa, Artificial Sequence
  Description of Artificial Sequence: Synthetic peptide
SSFSLI

SEQ ID NO: 122 - protein, 6 aa, Artificial Sequence
  Description of Artificial Sequence: Synthetic peptide
SAYSLI

SEQ ID NO: 123 - protein, 6 aa, Artificial Sequence
  Description of Artificial Sequence: Synthetic peptide
SSYALI

SEQ ID NO: 124 - protein, 6 aa, Artificial Sequence
  Description of Artificial Sequence: Synthetic peptide
SYFSLI

SEQ ID NO: 125 - protein, 6 aa, Artificial Sequence
  Description of Artificial Sequence: Synthetic peptide
SRFTLI

SEQ ID NO: 126 - protein, 6 aa, Artificial Sequence
  Description of Artificial Sequence: Synthetic peptide
SSNTLI

SEQ ID NO: 127 - protein, 6 aa, Artificial Sequence
  Description of Artificial Sequence: Synthetic peptide
SSFALI

SEQ ID NO: 128 - protein, 6 aa, Artificial Sequence
  Description of Artificial Sequence: Synthetic peptide
ANYALI

SEQ ID NO: 129 - protein, 6 aa, Artificial Sequence
  Description of Artificial Sequence: Synthetic peptide
SSASLI

SEQ ID NO: 130 - protein, 6 aa, Artificial Sequence
  Description of Artificial Sequence: Synthetic peptide
SSYSLI

SEQ ID NO: 131 - protein, 6 aa, Artificial Sequence
  Description of Artificial Sequence: Synthetic peptide
SAFYLI

SEQ ID NO: 132 - protein, 6 aa, Artificial Sequence
  Description of Artificial Sequence: Synthetic peptide
SAYFLI

SEQ ID NO: 133 - protein, 6 aa, Artificial Sequence
  Description of Artificial Sequence: Synthetic peptide
ASSSLI

SEQ ID NO: 134 - protein, 6 aa, Artificial Sequence
  Description of Artificial Sequence: Synthetic peptide
SIYSLI

SEQ ID NO: 135 - protein, 6 aa, Artificial Sequence
  Description of Artificial Sequence: Synthetic peptide
STGSLI

SEQ ID NO: 136 - protein, 6 aa, Artificial Sequence
  Description of Artificial Sequence: Synthetic peptide
SSHSLI

SEQ ID NO: 137 - protein, 6 aa, Artificial Sequence
  Description of Artificial Sequence: Synthetic peptide
SSYTLI

SEQ ID NO: 138 - protein, 6 aa, Artificial Sequence
  Description of Artificial Sequence: Synthetic peptide
SYHYLI

SEQ ID NO: 139 - protein, 6 aa, Artificial Sequence
  Description of Artificial Sequence: Synthetic peptide
STYFFI

SEQ ID NO: 140 - protein, 6 aa, Artificial Sequence
  Description of Artificial Sequence: Synthetic peptide
TSFYFM

SEQ ID NO: 141 - protein, 6 aa, Artificial Sequence
  Description of Artificial Sequence: Synthetic peptide
SSFYFI

SEQ ID NO: 142 - protein, 6 aa, Artificial Sequence
  Description of Artificial Sequence: Synthetic peptide
SAYYFI

SEQ ID NO: 143 - protein, 6 aa, Artificial Sequence
  Description of Artificial Sequence: Synthetic peptide
SYFYFM

SEQ ID NO: 144 - protein, 6 aa, Artificial Sequence
  Description of Artificial Sequence: Synthetic peptide
TSFYYM

SEQ ID NO: 145 - protein, 6 aa, Artificial Sequence
  Description of Artificial Sequence: Synthetic peptide
FTFYFM

SEQ ID NO: 146 - protein, 6 aa, Artificial Sequence
  Description of Artificial Sequence: Synthetic peptide
SSYYFI

SEQ ID NO: 147 - protein, 6 aa, Artificial Sequence
  Description of Artificial Sequence: Synthetic peptide
SSFYVM

SEQ ID NO: 148 - protein, 6 aa, Artificial Sequence
  Description of Artificial Sequence: Synthetic peptide
SSFYFM

SEQ ID NO: 149 - protein, 6 aa, Artificial Sequence
  Description of Artificial Sequence: Synthetic peptide
SSFYYI

SEQ ID NO: 150 - protein, 6 aa, Artificial Sequence
  Description of Artificial Sequence: Synthetic peptide
STFYFM

SEQ ID NO: 151 - protein, 6 aa, Artificial Sequence
  Description of Artificial Sequence: Synthetic peptide
SAFYYM

SEQ ID NO: 152 - protein, 6 aa, Artificial Sequence
  Description of Artificial Sequence: Synthetic peptide
ASFYFM

SEQ ID NO: 153 - protein, 6 aa, Artificial Sequence
  Description of Artificial Sequence: Synthetic peptide
SAFYFI

SEQ ID NO: 154 - protein, 6 aa, Artificial Sequence
  Description of Artificial Sequence: Synthetic peptide
FPFYFM

SEQ ID NO: 155 - protein, 6 aa, Artificial Sequence
  Description of Artificial Sequence: Synthetic peptide
SAFYFM

SEQ ID NO: 156 - protein, 6 aa, Artificial Sequence
  Description of Artificial Sequence: Synthetic peptide
ASYYFM

SEQ ID NO: 157 - protein, 6 aa, Artificial Sequence
  Description of Artificial Sequence: Synthetic peptide
SVFYFM

SEQ ID NO: 158 - protein, 6 aa, Artificial Sequence
  Description of Artificial Sequence: Synthetic peptide
SSLYYM

SEQ ID NO: 159 - protein, 6 aa, Artificial Sequence
  Description of Artificial Sequence: Synthetic peptide
SNFYLM

SEQ ID NO: 160 - protein, 6 aa, Artificial Sequence
  Description of Artificial Sequence: Synthetic peptide
FSFYFI

SEQ ID NO: 161 - protein, 6 aa, Artificial Sequence
  Description of Artificial Sequence: Synthetic peptide
SSLYFM

SEQ ID NO: 162 - protein, 6 aa, Artificial Sequence
  Description of Artificial Sequence: Synthetic peptide
YYFYYM

SEQ ID NO: 163 - protein, 6 aa, Artificial Sequence
  Description of Artificial Sequence: Synthetic peptide
TSYYFI

SEQ ID NO: 164 - protein, 6 aa, Artificial Sequence
  Description of Artificial Sequence: Synthetic peptide
SDFYFI

SEQ ID NO: 165 - protein, 6 aa, Artificial Sequence
  Description of Artificial Sequence: Synthetic peptide
SSFYYM

SEQ ID NO: 166 - protein, 10 aa, Artificial Sequence
  Description of Artificial Sequence: Synthetic peptide
TIYPYLNSTY

SEQ ID NO: 167 - protein, 10 aa, Artificial Sequence
  Description of Artificial Sequence: Synthetic peptide
SVYPYLDNTY

SEQ ID NO: 168 - protein, 10 aa, Artificial Sequence
  Description of Artificial Sequence: Synthetic peptide
TVYSYIDITY

SEQ ID NO: 169 - protein, 10 aa, Artificial Sequence
  Description of Artificial Sequence: Synthetic peptide
TVYPYRGYTY

SEQ ID NO: 170 - protein, 10 aa, Artificial Sequence
  Description of Artificial Sequence: Synthetic peptide
SVYPYLSYTY

SEQ ID NO: 171 - protein, 10 aa, Artificial Sequence
  Description of Artificial Sequence: Synthetic peptide
SVYPYLDFTY

SEQ ID NO: 172 - protein, 10 aa, Artificial Sequence
  Description of Artificial Sequence: Synthetic peptide
AIYPYLDYTY

SEQ ID NO: 173 - protein, 10 aa, Artificial Sequence
  Description of Artificial Sequence: Synthetic peptide
SIYPYLNYTF

SEQ ID NO: 174 - protein, 10 aa, Artificial Sequence
  Description of Artificial Sequence: Synthetic peptide
TIYPYSDNTY

SEQ ID NO: 175 - protein, 10 aa, Artificial Sequence
  Description of Artificial Sequence: Synthetic peptide
SIYSYGNITY

SEQ ID NO: 176 - protein, 10 aa, Artificial Sequence
  Description of Artificial Sequence: Synthetic peptide
AIYPYLSYTY

SEQ ID NO: 177 - protein, 10 aa, Artificial Sequence
  Description of Artificial Sequence: Synthetic peptide
TVFPYLGRTY

SEQ ID NO: 178 - protein, 10 aa, Artificial Sequence
  Description of Artificial Sequence: Synthetic peptide
SVYPYLNYTY

SEQ ID NO: 179 - protein, 10 aa, Artificial Sequence
  Description of Artificial Sequence: Synthetic peptide
TVYPYLSYTY

SEQ ID NO: 180 - protein, 10 aa, Artificial Sequence
  Description of Artificial Sequence: Synthetic peptide
TVYPYLNHTY

SEQ ID NO: 181 - protein, 10 aa, Artificial Sequence
  Description of Artificial Sequence: Synthetic peptide
SIYPYLSYTY

SEQ ID NO: 182 - protein, 10 aa, Artificial Sequence
  Description of Artificial Sequence: Synthetic peptide
SVYPYLNDTY

SEQ ID NO: 183 - protein, 10 aa, Artificial Sequence
  Description of Artificial Sequence: Synthetic peptide
SVYSSLSHTY

SEQ ID NO: 184 - protein, 10 aa, Artificial Sequence
  Description of Artificial Sequence: Synthetic peptide
SVYPYNDITY

SEQ ID NO: 185 - protein, 10 aa, Artificial Sequence
  Description of Artificial Sequence: Synthetic peptide
SVYPYLDNTH

SEQ ID NO: 186 - protein, 10 aa, Artificial Sequence
  Description of Artificial Sequence: Synthetic peptide
SIYSYLNYTF

SEQ ID NO: 187 - protein, 10 aa, Artificial Sequence
  Description of Artificial Sequence: Synthetic peptide
SIYPYLDFTH

SEQ ID NO: 188 - protein, 10 aa, Artificial Sequence
  Description of Artificial Sequence: Synthetic peptide
AIYPYIGYTY

SEQ ID NO: 189 - protein, 10 aa, Artificial Sequence
  Description of Artificial Sequence: Synthetic peptide
TIYPFRGTTY

SEQ ID NO: 190 - protein, 10 aa, Artificial Sequence
  Description of Artificial Sequence: Synthetic peptide
AIYPYLGYTY

SEQ ID NO: 191 - protein, 10 aa, Artificial Sequence
  Description of Artificial Sequence: Synthetic peptide
SVYPYLGDTY

SEQ ID NO: 192 - protein, 10 aa, Artificial Sequence
  Description of Artificial Sequence: Synthetic peptide
SVYSYLGYTF

SEQ ID NO: 193 - protein, 10 aa, Artificial Sequence
  Description of Artificial Sequence: Synthetic peptide
TVYPYLSHTY

SEQ ID NO: 194 - protein, 10 aa, Artificial Sequence
  Description of Artificial Sequence: Synthetic peptide
TIYPFIGNTY

SEQ ID NO: 195 - protein, 10 aa, Artificial Sequence
  Description of Artificial Sequence: Synthetic peptide
SVYPYVDYTY

SEQ ID NO: 196 - protein, 10 aa, Artificial Sequence
  Description of Artificial Sequence: Synthetic peptide
TVYPYLSFTY

SEQ ID NO: 197 - protein, 10 aa, Artificial Sequence
  Description of Artificial Sequence: Synthetic peptide
SVYPYLDDTY

SEQ ID NO: 198 - protein, 9 aa, Artificial Sequence
  Description of Artificial Sequence: Synthetic peptide
AYPGSYHPL

SEQ ID NO: 199 - protein, 9 aa, Artificial Sequence
  Description of Artificial Sequence: Synthetic peptide
AFPGSYHPM

SEQ ID NO: 200 - protein, 9 aa, Artificial Sequence
  Description of Artificial Sequence: Synthetic peptide
AFPFSYHPM

SEQ ID NO: 201 - protein, 9 aa, Artificial Sequence
  Description of Artificial Sequence: Synthetic peptide
GYPLAYTPL

SEQ ID NO: 202 - protein, 9 aa, Artificial Sequence
  Description of Artificial Sequence: Synthetic peptide
ALQGHYHPM

SEQ ID NO: 203 - protein, 9 aa, Artificial Sequence
  Description of Artificial Sequence: Synthetic peptide
AFPGSYLPM

SEQ ID NO: 204 - protein, 9 aa, Artificial Sequence
  Description of Artificial Sequence: Synthetic peptide
GFPGRYHPL

SEQ ID NO: 205 - protein, 9 aa, Artificial Sequence
  Description of Artificial Sequence: Synthetic peptide
AFPLSYHPM

SEQ ID NO: 206 - protein, 9 aa, Artificial Sequence
  Description of Artificial Sequence: Synthetic peptide
AFPGRYHGM

SEQ ID NO: 207 - protein, 9 aa, Artificial Sequence
  Description of Artificial Sequence: Synthetic peptide
AFPFSYTPL

SEQ ID NO: 208 - protein, 9 aa, Artificial Sequence
  Description of Artificial Sequence: Synthetic peptide
AFPGAYSPM

SEQ ID NO: 209 - protein, 9 aa, Artificial Sequence
  Description of Artificial Sequence: Synthetic peptide
AFPGAYHPM

SEQ ID NO: 210 - protein, 9 aa, Artificial Sequence
  Description of Artificial Sequence: Synthetic peptide
AFPGAYHPF

SEQ ID NO: 211 - protein, 9 aa, Artificial Sequence
  Description of Artificial Sequence: Synthetic peptide
AYPGFYHPI

SEQ ID NO: 212 - protein, 9 aa, Artificial Sequence
  Description of Artificial Sequence: Synthetic peptide
AYPLSYHPM

SEQ ID NO: 213 - protein, 9 aa, Artificial Sequence
  Description of Artificial Sequence: Synthetic peptide
ALPGFYHPF

SEQ ID NO: 214 - protein, 9 aa, Artificial Sequence
  Description of Artificial Sequence: Synthetic peptide
GFPGTYHPL

SEQ ID NO: 215 - protein, 9 aa, Artificial Sequence
  Description of Artificial Sequence: Synthetic peptide
AIPGFYHPI

SEQ ID NO: 216 - protein, 9 aa, Artificial Sequence
  Description of Artificial Sequence: Synthetic peptide
AFPGSYHPL

SEQ ID NO: 217 - protein, 9 aa, Artificial Sequence
  Description of Artificial Sequence: Synthetic peptide
PFPASYHPL

SEQ ID NO: 218 - protein, 9 aa, Artificial Sequence
  Description of Artificial Sequence: Synthetic peptide
AYPGRYHPL

SEQ ID NO: 219 - protein, 9 aa, Artificial Sequence
  Description of Artificial Sequence: Synthetic peptide
AFPGFYHPF

SEQ ID NO: 220 - protein, 9 aa, Artificial Sequence
  Description of Artificial Sequence: Synthetic peptide
AFPGSYHPF

SEQ ID NO: 221 - protein, 9 aa, Artificial Sequence
  Description of Artificial Sequence: Synthetic peptide
AFPGFYHPM

SEQ ID NO: 222 - protein, 9 aa, Artificial Sequence
  Description of Artificial Sequence: Synthetic peptide
ALPGSYHPF

SEQ ID NO: 223 - protein, 9 aa, Artificial Sequence
  Description of Artificial Sequence: Synthetic peptide
WYSGVHGLI

SEQ ID NO: 224 - protein, 9 aa, Artificial Sequence
  Description of Artificial Sequence: Synthetic peptide
WFSSAHVPF

SEQ ID NO: 225 - protein, 9 aa, Artificial Sequence
  Description of Artificial Sequence: Synthetic peptide
WYSYGHHLI

SEQ ID NO: 226 - protein, 9 aa, Artificial Sequence
  Description of Artificial Sequence: Synthetic peptide
WYTSGHVLI

SEQ ID NO: 227 - protein, 9 aa, Artificial Sequence
  Description of Artificial Sequence: Synthetic peptide
WYASDHGLI

SEQ ID NO: 228 - protein, 9 aa, Artificial Sequence
  Description of Artificial Sequence: Synthetic peptide
WFSPGNVLI

SEQ ID NO: 229 - protein, 9 aa, Artificial Sequence
  Description of Artificial Sequence: Synthetic peptide
WYSTRNILI

SEQ ID NO: 230 - protein, 9 aa, Artificial Sequence
  Description of Artificial Sequence: Synthetic peptide
WYFSDHDLF

SEQ ID NO: 231 - protein, 9 aa, Artificial Sequence
  Description of Artificial Sequence: Synthetic peptide
WYSSGDVLI

SEQ ID NO: 232 - protein, 9 aa, Artificial Sequence
  Description of Artificial Sequence: Synthetic peptide
WYSSADVLF

SEQ ID NO: 233 - protein, 9 aa, Artificial Sequence
  Description of Artificial Sequence: Synthetic peptide
WYSSGHGLI

SEQ ID NO: 234 - protein, 9 aa, Artificial Sequence
  Description of Artificial Sequence: Synthetic peptide
WYSSGHALI

SEQ ID NO: 235 - protein, 9 aa, Artificial Sequence
  Description of Artificial Sequence: Synthetic peptide
WYSSNHIPI

SEQ ID NO: 236 - protein, 9 aa, Artificial Sequence
  Description of Artificial Sequence: Synthetic peptide
WYSSSNVLI

SEQ ID NO: 237 - protein, 9 aa, Artificial Sequence
  Description of Artificial Sequence: Synthetic peptide
WYFSDRVLI

SEQ ID NO: 238 - protein, 9 aa, Artificial Sequence
  Description of Artificial Sequence: Synthetic peptide
WYPSSHVLI

SEQ ID NO: 239 - protein, 9 aa, Artificial Sequence
  Description of Artificial Sequence: Synthetic peptide
WYSSRHHLI

SEQ ID NO: 240 - protein, 9 aa, Artificial Sequence
  Description of Artificial Sequence: Synthetic peptide
WYSTGRVLF

SEQ ID NO: 241 - protein, 9 aa, Artificial Sequence
  Description of Artificial Sequence: Synthetic peptide
WFPTGHVLF

SEQ ID NO: 242 - protein, 9 aa, Artificial Sequence
  Description of Artificial Sequence: Synthetic peptide
WYAPRHVLI

SEQ ID NO: 243 - protein, 9 aa, Artificial Sequence
  Description of Artificial Sequence: Synthetic peptide
WFTSGLVLF

SEQ ID NO: 244 - protein, 9 aa, Artificial Sequence
  Description of Artificial Sequence: Synthetic peptide
WYSSGHVLF

SEQ ID NO: 245 - protein, 9 aa, Artificial Sequence
  Description of Artificial Sequence: Synthetic peptide
WYPGAPVLI

SEQ ID NO: 246 - protein, 9 aa, Artificial Sequence
  Description of Artificial Sequence: Synthetic peptide
WYSSANALF

SEQ ID NO: 247 - protein, 9 aa, Artificial Sequence
  Description of Artificial Sequence: Synthetic peptide
WYSSNHVLI

SEQ ID NO: 248 - protein, 9 aa, Artificial Sequence
  Description of Artificial Sequence: Synthetic peptide
WYSAAHILF

SEQ ID NO: 249 - protein, 9 aa, Artificial Sequence
  Description of Artificial Sequence: Synthetic peptide
WFASGHVLI

SEQ ID NO: 250 - protein, 9 aa, Artificial Sequence
  Description of Artificial Sequence: Synthetic peptide
WFSSGDSLI

SEQ ID NO: 251 - protein, 9 aa, Artificial Sequence
  Description of Artificial Sequence: Synthetic peptide
WYASGNVLI

SEQ ID NO: 252 - protein, 9 aa, Artificial Sequence
  Description of Artificial Sequence: Synthetic peptide
WFSPGHLLI

SEQ ID NO: 253 - protein, 9 aa, Artificial Sequence
  Description of Artificial Sequence: Synthetic peptide
WYPSGHVLF

SEQ ID NO: 254 - protein, 9 aa, Artificial Sequence
  Description of Artificial Sequence: Synthetic peptide
WFAAGHVLI

SEQ ID NO: 255 - protein, 9 aa, Artificial Sequence
  Description of Artificial Sequence: Synthetic peptide
WFRSAHVLI

SEQ ID NO: 256 - protein, 9 aa, Artificial Sequence
  Description of Artificial Sequence: Synthetic peptide
WFASGHILI

SEQ ID NO: 257 - protein, 9 aa, Artificial Sequence
  Description of Artificial Sequence: Synthetic peptide
WFSGGHALI

SEQ ID NO: 258 - protein, 9 aa, Artificial Sequence
  Description of Artificial Sequence: Synthetic peptide
WFASAHVLF

SEQ ID NO: 259 - protein, 9 aa, Artificial Sequence
  Description of Artificial Sequence: Synthetic peptide
WYSPGHVLI

SEQ ID NO: 260 - protein, 9 aa, Artificial Sequence
  Description of Artificial Sequence: Synthetic peptide
WYASGLVLI

SEQ ID NO: 261 - protein, 9 aa, Artificial Sequence
  Description of Artificial Sequence: Synthetic peptide
WYTSGHVLF

SEQ ID NO: 262 - protein, 9 aa, Artificial Sequence
  Description of Artificial Sequence: Synthetic peptide
WFSFPHALI

SEQ ID NO: 263 - protein, 9 aa, Artificial Sequence
  Description of Artificial Sequence: Synthetic peptide
WYASGTDLI

SEQ ID NO: 264 - protein, 9 aa, Artificial Sequence
  Description of Artificial Sequence: Synthetic peptide
WYSSGRLLI

SEQ ID NO: 265 - protein, 9 aa, Artificial Sequence
  Description of Artificial Sequence: Synthetic peptide
WFSSPHVLF

SEQ ID NO: 266 - protein, 9 aa, Artificial Sequence
  Description of Artificial Sequence: Synthetic peptide
WFASASSLF

SEQ ID NO: 267 - protein, 9 aa, Artificial Sequence
  Description of Artificial Sequence: Synthetic peptide
WYPSSHVLF

SEQ ID NO: 268 - protein, 9 aa, Artificial Sequence
  Description of Artificial Sequence: Synthetic peptide
WFPAHHVLF

SEQ ID NO: 269 - protein, 9 aa, Artificial Sequence
  Description of Artificial Sequence: Synthetic peptide
WFPSGNVLF

SEQ ID NO: 270 - protein, 9 aa, Artificial Sequence
  Description of Artificial Sequence: Synthetic peptide
WYSSNNVLI

SEQ ID NO: 271 - protein, 9 aa, Artificial Sequence
  Description of Artificial Sequence: Synthetic peptide
WFSSRHVLF

SEQ ID NO: 272 - protein, 9 aa, Artificial Sequence
  Description of Artificial Sequence: Synthetic peptide
WYFSDHDLI

SEQ ID NO: 273 - protein, 9 aa, Artificial Sequence
  Description of Artificial Sequence: Synthetic peptide
WYSSGGVLI

SEQ ID NO: 274 - protein, 9 aa, Artificial Sequence
  Description of Artificial Sequence: Synthetic peptide
WFPSGHVLF

SEQ ID NO: 275 - protein, 9 aa, Artificial Sequence
  Description of Artificial Sequence: Synthetic peptide
WYSSTHVLF

SEQ ID NO: 276 - protein, 9 aa, Artificial Sequence
  Description of Artificial Sequence: Synthetic peptide
WYSSGSALI

SEQ ID NO: 277 - protein, 9 aa, Artificial Sequence
  Description of Artificial Sequence: Synthetic peptide
WFSPGSVLI

SEQ ID NO: 278 - protein, 9 aa, Artificial Sequence
  Description of Artificial Sequence: Synthetic peptide
WYPSAHILF

SEQ ID NO: 279 - protein, 9 aa, Artificial Sequence
  Description of Artificial Sequence: Synthetic peptide
WYGSGGILI

SEQ ID NO: 280 - protein, 9 aa, Artificial Sequence
  Description of Artificial Sequence: Synthetic peptide
WFTSGRDLF

SEQ ID NO: 281 - protein, 9 aa, Artificial Sequence
  Description of Artificial Sequence: Synthetic peptide
WYLSRNILI

SEQ ID NO: 282 - protein, 9 aa, Artificial Sequence
  Description of Artificial Sequence: Synthetic peptide
WFSGRDALF

SEQ ID NO: 283 - protein, 6 aa, Artificial Sequence
  Description of Artificial Sequence: Synthetic peptide
AFFYPI

SEQ ID NO: 284 - protein, 6 aa, Artificial Sequence
  Description of Artificial Sequence: Synthetic peptide
AFYFPI

SEQ ID NO: 285 - protein, 6 aa, Artificial Sequence
  Description of Artificial Sequence: Synthetic peptide
AHYFPI

SEQ ID NO: 286 - protein, 6 aa, Artificial Sequence
  Description of Artificial Sequence: Synthetic peptide
SHYYPI

SEQ ID NO: 287 - protein, 6 aa, Artificial Sequence
  Description of Artificial Sequence: Synthetic peptide
GFYYPI

SEQ ID NO: 288 - protein, 6 aa, Artificial Sequence
  Description of Artificial Sequence: Synthetic peptide
AFYYPI

SEQ ID NO: 289 - protein, 6 aa, Artificial Sequence
  Description of Artificial Sequence: Synthetic peptide
SFYFPI

SEQ ID NO: 290 - protein, 6 aa, Artificial Sequence
  Description of Artificial Sequence: Synthetic peptide
ADYFPI

SEQ ID NO: 291 - protein, 6 aa, Artificial Sequence
  Description of Artificial Sequence: Synthetic peptide
AFHYPI

SEQ ID NO: 292 - protein, 6 aa, Artificial Sequence
  Description of Artificial Sequence: Synthetic peptide
AYYYPI

SEQ ID NO: 293 - protein, 6 aa, Artificial Sequence
  Description of Artificial Sequence: Synthetic peptide
VFYYPI

SEQ ID NO: 294 - protein, 6 aa, Artificial Sequence
  Description of Artificial Sequence: Synthetic peptide
ANYFPI

SEQ ID NO: 295 - protein, 6 aa, Artificial Sequence
  Description of Artificial Sequence: Synthetic peptide
GFYFPI

SEQ ID NO: 296 - protein, 6 aa, Artificial Sequence
  Description of Artificial Sequence: Synthetic peptide
AYYFPI

SEQ ID NO: 297 - protein, 6 aa, Artificial Sequence
  Description of Artificial Sequence: Synthetic peptide
AFIFPI

SEQ ID NO: 298 - protein, 6 aa, Artificial Sequence
  Description of Artificial Sequence: Synthetic peptide
AFFFPI

SEQ ID NO: 299 - protein, 6 aa, Artificial Sequence
  Description of Artificial Sequence: Synthetic peptide
SFYYPI

SEQ ID NO: 300 - protein, 6 aa, Artificial Sequence
  Description of Artificial Sequence: Synthetic peptide
ALYYPI

SEQ ID NO: 301 - protein, 6 aa, Artificial Sequence
  Description of Artificial Sequence: Synthetic peptide
RFYFPI

SEQ ID NO: 302 - protein, 6 aa, Artificial Sequence
  Description of Artificial Sequence: Synthetic peptide
LYYFPI

SEQ ID NO: 303 - protein, 6 aa, Artificial Sequence
  Description of Artificial Sequence: Synthetic peptide
SSYFPI

SEQ ID NO: 304 - protein, 6 aa, Artificial Sequence
  Description of Artificial Sequence: Synthetic peptide
ASYFPI

SEQ ID NO: 305 - protein, 6 aa, Artificial Sequence
  Description of Artificial Sequence: Synthetic peptide
AHYYPI

SEQ ID NO: 306 - protein, 6 aa, Artificial Sequence
  Description of Artificial Sequence: Synthetic peptide
AGFFPI

SEQ ID NO: 307 - protein, 6 aa, Artificial Sequence
  Description of Artificial Sequence: Synthetic peptide
SSYYPI

SEQ ID NO: 308 - protein, 6 aa, Artificial Sequence
  Description of Artificial Sequence: Synthetic peptide
LIYTYI

SEQ ID NO: 309 - protein, 6 aa, Artificial Sequence
  Description of Artificial Sequence: Synthetic peptide
ITYPGM

SEQ ID NO: 310 - protein, 6 aa, Artificial Sequence
  Description of Artificial Sequence: Synthetic peptide
ISYSYM

SEQ ID NO: 311 - protein, 6 aa, Artificial Sequence
  Description of Artificial Sequence: Synthetic peptide
ISFFYM

SEQ ID NO: 312 - protein, 6 aa, Artificial Sequence
  Description of Artificial Sequence: Synthetic peptide
IPYFYM

SEQ ID NO: 313 - protein, 6 aa, Artificial Sequence
  Description of Artificial Sequence: Synthetic peptide
ISYYYI

SEQ ID NO: 314 - protein, 6 aa, Artificial Sequence
  Description of Artificial Sequence: Synthetic peptide
ISYAYM

SEQ ID NO: 315 - protein, 6 aa, Artificial Sequence
  Description of Artificial Sequence: Synthetic peptide
ITYFYM

SEQ ID NO: 316 - protein, 6 aa, Artificial Sequence
  Description of Artificial Sequence: Synthetic peptide
IYYSYI

SEQ ID NO: 317 - protein, 6 aa, Artificial Sequence
  Description of Artificial Sequence: Synthetic peptide
ILNTYM

SEQ ID NO: 318 - protein, 6 aa, Artificial Sequence
  Description of Artificial Sequence: Synthetic peptide
ISFYYI

SEQ ID NO: 319 - protein, 6 aa, Artificial Sequence
  Description of Artificial Sequence: Synthetic peptide
LAYSYM

SEQ ID NO: 320 - protein, 6 aa, Artificial Sequence
  Description of Artificial Sequence: Synthetic peptide
IRYSYI

SEQ ID NO: 321 - protein, 6 aa, Artificial Sequence
  Description of Artificial Sequence: Synthetic peptide
ITYSYM

SEQ ID NO: 322 - protein, 6 aa, Artificial Sequence
  Description of Artificial Sequence: Synthetic peptide
IINTYM

SEQ ID NO: 323 - protein, 6 aa, Artificial Sequence
  Description of Artificial Sequence: Synthetic peptide
LANSYM

SEQ ID NO: 324 - protein, 6 aa, Artificial Sequence
  Description of Artificial Sequence: Synthetic peptide
LSYTYM

SEQ ID NO: 325 - protein, 6 aa, Artificial Sequence
  Description of Artificial Sequence: Synthetic peptide
ISYSYI

SEQ ID NO: 326 - protein, 6 aa, Artificial Sequence
  Description of Artificial Sequence: Synthetic peptide
LSYLYI

SEQ ID NO: 327 - protein, 6 aa, Artificial Sequence
  Description of Artificial Sequence: Synthetic peptide
ISYAYI

SEQ ID NO: 328 - protein, 6 aa, Artificial Sequence
  Description of Artificial Sequence: Synthetic peptide
IAYSYM

SEQ ID NO: 329 - protein, 9 aa, Artificial Sequence
  Description of Artificial Sequence: Synthetic peptide
FIWESLLVS

SEQ ID NO: 330 - protein, 6 aa, Artificial Sequence
  Description of Artificial Sequence: Synthetic peptide
ISHSYM

SEQ ID NO: 331 - protein, 6 aa, Artificial Sequence
  Description of Artificial Sequence: Synthetic peptide
LRYSYI

SEQ ID NO: 332 - protein, 6 aa, Artificial Sequence
  Description of Artificial Sequence: Synthetic peptide
IRYAYM

SEQ ID NO: 333 - protein, 6 aa, Artificial Sequence
  Description of Artificial Sequence: Synthetic peptide
ITHLYM

SEQ ID NO: 334 - protein, 6 aa, Artificial Sequence
  Description of Artificial Sequence: Synthetic peptide
LSIFYM

SEQ ID NO: 335 - protein, 6 aa, Artificial Sequence
  Description of Artificial Sequence: Synthetic peptide
LSYSYI

SEQ ID NO: 336 - protein, 6 aa, Artificial Sequence
  Description of Artificial Sequence: Synthetic peptide
ISYSFM

SEQ ID NO: 337 - protein, 6 aa, Artificial Sequence
  Description of Artificial Sequence: Synthetic peptide
IAYVGI

SEQ ID NO: 338 - protein, 6 aa, Artificial Sequence
  Description of Artificial Sequence: Synthetic peptide
LSYSYM

SEQ ID NO: 339 - protein, 6 aa, Artificial Sequence
  Description of Artificial Sequence: Synthetic peptide
IAYFYI

SEQ ID NO: 340 - protein, 6 aa, Artificial Sequence
  Description of Artificial Sequence: Synthetic peptide
LSSSYM

SEQ ID NO: 341 - protein, 6 aa, Artificial Sequence
  Description of Artificial Sequence: Synthetic peptide
IYYSYM

SEQ ID NO: 342 - protein, 6 aa, Artificial Sequence
  Description of Artificial Sequence: Synthetic peptide
LHYGGI

SEQ ID NO: 343 - protein, 6 aa, Artificial Sequence
  Description of Artificial Sequence: Synthetic peptide
IGYAYM

SEQ ID NO: 344 - protein, 6 aa, Artificial Sequence
  Description of Artificial Sequence: Synthetic peptide
LSYSSI

SEQ ID NO: 345 - protein, 6 aa, Artificial Sequence
  Description of Artificial Sequence: Synthetic peptide
LSYDGI

SEQ ID NO: 346 - protein, 6 aa, Artificial Sequence
  Description of Artificial Sequence: Synthetic peptide
LSYAYM

SEQ ID NO: 347 - protein, 6 aa, Artificial Sequence
  Description of Artificial Sequence: Synthetic peptide
ISYSGI

SEQ ID NO: 348 - protein, 6 aa, Artificial Sequence
  Description of Artificial Sequence: Synthetic peptide
ISSSYM

SEQ ID NO: 349 - protein, 6 aa, Artificial Sequence
  Description of Artificial Sequence: Synthetic peptide
LSYSGM

SEQ ID NO: 350 - protein, 9 aa, Artificial Sequence
  Description of Artificial Sequence: Synthetic peptide
GFTISYFFM

SEQ ID NO: 351 - protein, 6 aa, Artificial Sequence
  Description of Artificial Sequence: Synthetic peptide
ISYSFI

SEQ ID NO: 352 - protein, 6 aa, Artificial Sequence
  Description of Artificial Sequence: Synthetic peptide
ISHAYM

SEQ ID NO: 353 - protein, 6 aa, Artificial Sequence
  Description of Artificial Sequence: Synthetic peptide
LLFFYM

SEQ ID NO: 354 - protein, 6 aa, Artificial Sequence
  Description of Artificial Sequence: Synthetic peptide
LSYFYM

SEQ ID NO: 355 - protein, 9 aa, Artificial Sequence
  Description of Artificial Sequence: Synthetic peptide
GFTLISSSI

SEQ ID NO: 356 - protein, 6 aa, Artificial Sequence
  Description of Artificial Sequence: Synthetic peptide
ITNSYM

SEQ ID NO: 357 - protein, 6 aa, Artificial Sequence
  Description of Artificial Sequence: Synthetic peptide
ISFSSI

SEQ ID NO: 358 - protein, 6 aa, Artificial Sequence
  Description of Artificial Sequence: Synthetic peptide
ISYSSM

SEQ ID NO: 359 - protein, 6 aa, Artificial Sequence
  Description of Artificial Sequence: Synthetic peptide
LSFSSM

SEQ ID NO: 360 - protein, 6 aa, Artificial Sequence
  Description of Artificial Sequence: Synthetic peptide
ISFGSI

SEQ ID NO: 361 - protein, 6 aa, Artificial Sequence
  Description of Artificial Sequence: Synthetic peptide
ITYSSI

SEQ ID NO: 362 - protein, 6 aa, Artificial Sequence
  Description of Artificial Sequence: Synthetic peptide
ISYSAI

SEQ ID NO: 363 - protein, 6 aa, Artificial Sequence
  Description of Artificial Sequence: Synthetic peptide
ISYSSI

SEQ ID NO: 364 - protein, 6 aa, Artificial Sequence
  Description of Artificial Sequence: Synthetic peptide
LSYSSM

SEQ ID NO: 365 - protein, 6 aa, Artificial Sequence
  Description of Artificial Sequence: Synthetic peptide
IAYSSM

SEQ ID NO: 366 - protein, 6 aa, Artificial Sequence
  Description of Artificial Sequence: Synthetic peptide
ISYSAM

SEQ ID NO: 367 - protein, 6 aa, Artificial Sequence
  Description of Artificial Sequence: Synthetic peptide
ISYGVI

SEQ ID NO: 368 - protein, 6 aa, Artificial Sequence
  Description of Artificial Sequence: Synthetic peptide
IPYGSM

SEQ ID NO: 369 - protein, 6 aa, Artificial Sequence
  Description of Artificial Sequence: Synthetic peptide
IAYSAM

SEQ ID NO: 370 - protein, 6 aa, Artificial Sequence
  Description of Artificial Sequence: Synthetic peptide
LSFSSI

SEQ ID NO: 371 - protein, 6 aa, Artificial Sequence
  Description of Artificial Sequence: Synthetic peptide
LTYSSI

SEQ ID NO: 372 - protein, 6 aa, Artificial Sequence
  Description of Artificial Sequence: Synthetic peptide
LSYGSI

SEQ ID NO: 373 - protein, 6 aa, Artificial Sequence
  Description of Artificial Sequence: Synthetic peptide
ITYSSM

SEQ ID NO: 374 - protein, 6 aa, Artificial Sequence
  Description of Artificial Sequence: Synthetic peptide
LGYGSM

SEQ ID NO: 375 - protein, 6 aa, Artificial Sequence
  Description of Artificial Sequence: Synthetic peptide
IGYSSI

SEQ ID NO: 376 - protein, 6 aa, Artificial Sequence
  Description of Artificial Sequence: Synthetic peptide
ITYGSI

SEQ ID NO: 377 - protein, 6 aa, Artificial Sequence
  Description of Artificial Sequence: Synthetic peptide
ISYGSM

SEQ ID NO: 378 - protein, 6 aa, Artificial Sequence
  Description of Artificial Sequence: Synthetic peptide
IYYSSM

SEQ ID NO: 379 - protein, 6 aa, Artificial Sequence
  Description of Artificial Sequence: Synthetic peptide
IFYSSM

SEQ ID NO: 380 - protein, 6 aa, Artificial Sequence
  Description of Artificial Sequence: Synthetic peptide
ISFSSM

SEQ ID NO: 381 - protein, 10 aa, Artificial Sequence
  Description of Artificial Sequence: Synthetic peptide
TIYPASSSTS

SEQ ID NO: 382 - protein, 10 aa, Artificial Sequence
  Description of Artificial Sequence: Synthetic peptide
TIFSSHGSTS

SEQ ID NO: 383 - protein, 10 aa, Artificial Sequence
  Description of Artificial Sequence: Synthetic peptide
SIYSSSSSTS

SEQ ID NO: 384 - protein, 10 aa, Artificial Sequence
  Description of Artificial Sequence: Synthetic peptide
TIDSSTGSTT

SEQ ID NO: 385 - protein, 10 aa, Artificial Sequence
  Description of Artificial Sequence: Synthetic peptide
SIYSSSGSTS

SEQ ID NO: 386 - protein, 10 aa, Artificial Sequence
  Description of Artificial Sequence: Synthetic peptide
SIYPSSSSTT

SEQ ID NO: 387 - protein, 10 aa, Artificial Sequence
  Description of Artificial Sequence: Synthetic peptide
SIYPSSSSTA

SEQ ID NO: 388 - protein, 10 aa, Artificial Sequence
  Description of Artificial Sequence: Synthetic peptide
SIYPSFGSTS

SEQ ID NO: 389 - protein, 10 aa, Artificial Sequence
  Description of Artificial Sequence: Synthetic peptide
SIYSSNGGTS

SEQ ID NO: 390 - protein, 10 aa, Artificial Sequence
  Description of Artificial Sequence: Synthetic peptide
SIYPASSSTS

SEQ ID NO: 391 - protein, 10 aa, Artificial Sequence
  Description of Artificial Sequence: Synthetic peptide
SIYPSSGDTS

SEQ ID NO: 392 - protein, 10 aa, Artificial Sequence
  Description of Artificial Sequence: Synthetic peptide
AIYSSSSSTS

SEQ ID NO: 393 - protein, 10 aa, Artificial Sequence
  Description of Artificial Sequence: Synthetic peptide
TIYPSSGSTA

SEQ ID NO: 394 - protein, 10 aa, Artificial Sequence
  Description of Artificial Sequence: Synthetic peptide
SIYSAPSSTA

SEQ ID NO: 395 - protein, 10 aa, Artificial Sequence
  Description of Artificial Sequence: Synthetic peptide
TIYSSSGSTS

SEQ ID NO: 396 - protein, 10 aa, Artificial Sequence
  Description of Artificial Sequence: Synthetic peptide
SIDPSSGSTS

SEQ ID NO: 397 - protein, 10 aa, Artificial Sequence
  Description of Artificial Sequence: Synthetic peptide
TIYPSSGSTG

SEQ ID NO: 398 - protein, 10 aa, Artificial Sequence
  Description of Artificial Sequence: Synthetic peptide
SIYPSSSSTS

SEQ ID NO: 399 - protein, 10 aa, Artificial Sequence
  Description of Artificial Sequence: Synthetic peptide
SIYSSPSSTS

SEQ ID NO: 400 - protein, 10 aa, Artificial Sequence
  Description of Artificial Sequence: Synthetic peptide
SIDSSSGSTS

SEQ ID NO: 401 - protein, 10 aa, Artificial Sequence
  Description of Artificial Sequence: Synthetic peptide
TIYSASGSTT

SEQ ID NO: 402 - protein, 10 aa, Artificial Sequence
  Description of Artificial Sequence: Synthetic peptide
SISPSDSSTS

SEQ ID NO: 403 - protein, 10 aa, Artificial Sequence
  Description of Artificial Sequence: Synthetic peptide
SIDPSSGLTS

SEQ ID NO: 404 - protein, 10 aa, Artificial Sequence
  Description of Artificial Sequence: Synthetic peptide
TIDSFSGSTS

SEQ ID NO: 405 - protein, 10 aa, Artificial Sequence
  Description of Artificial Sequence: Synthetic peptide
SIYPSSGSTS

SEQ ID NO: 406 - protein, 10 aa, Artificial Sequence
  Description of Artificial Sequence: Synthetic peptide
TIYPSSSSTS

SEQ ID NO: 407 - protein, 10 aa, Artificial Sequence
  Description of Artificial Sequence: Synthetic peptide
AIYPSPSSTS

SEQ ID NO: 408 - protein, 10 aa, Artificial Sequence
  Description of Artificial Sequence: Synthetic peptide
SIYSTSGSTS

SEQ ID NO: 409 - protein, 10 aa, Artificial Sequence
  Description of Artificial Sequence: Synthetic peptide
AITPSSSNTS

SEQ ID NO: 410 - protein, 10 aa, Artificial Sequence
  Description of Artificial Sequence: Synthetic peptide
SIDPSSSSTA

SEQ ID NO: 411 - protein, 10 aa, Artificial Sequence
  Description of Artificial Sequence: Synthetic peptide
SIYSRSGSTA

SEQ ID NO: 412 - protein, 10 aa, Artificial Sequence
  Description of Artificial Sequence: Synthetic peptide
TIDPSSGSTS

SEQ ID NO: 413 - protein, 10 aa, Artificial Sequence
  Description of Artificial Sequence: Synthetic peptide
SIGPSSGSTS

SEQ ID NO: 414 - protein, 10 aa, Artificial Sequence
  Description of Artificial Sequence: Synthetic peptide
SIDPSSSSTS

SEQ ID NO: 415 - protein, 10 aa, Artificial Sequence
  Description of Artificial Sequence: Synthetic peptide
SIYPSPSSTS

SEQ ID NO: 416 - protein, 10 aa, Artificial Sequence
  Description of Artificial Sequence: Synthetic peptide
SISSSFSSTS

SEQ ID NO: 417 - protein, 10 aa, Artificial Sequence
  Description of Artificial Sequence: Synthetic peptide
TIYSSSSSTA

SEQ ID NO: 418 - protein, 10 aa, Artificial Sequence
  Description of Artificial Sequence: Synthetic peptide
SIYSSPGSTA

SEQ ID NO: 419 - protein, 10 aa, Artificial Sequence
  Description of Artificial Sequence: Synthetic peptide
SICPFCSSTS

SEQ ID NO: 420 - protein, 10 aa, Artificial Sequence
  Description of Artificial Sequence: Synthetic peptide
SIHPFDGSTS

SEQ ID NO: 421 - protein, 10 aa, Artificial Sequence
  Description of Artificial Sequence: Synthetic peptide
SISSSSGSTA

SEQ ID NO: 422 - protein, 10 aa, Artificial Sequence
  Description of Artificial Sequence: Synthetic peptide
TIDPYAGSTS

SEQ ID NO: 423 - protein, 10 aa, Artificial Sequence
  Description of Artificial Sequence: Synthetic peptide
SIYPSSGSTA

SEQ ID NO: 424 - protein, 10 aa, Artificial Sequence
  Description of Artificial Sequence: Synthetic peptide
SIYPSDSSTS

SEQ ID NO: 425 - protein, 10 aa, Artificial Sequence
  Description of Artificial Sequence: Synthetic peptide
SIYPSSGHTS

SEQ ID NO: 426 - protein, 10 aa, Artificial Sequence
  Description of Artificial Sequence: Synthetic peptide
SIYSSPGSTS

SEQ ID NO: 427 - protein, 10 aa, Artificial Sequence
  Description of Artificial Sequence: Synthetic peptide
SIDPSSGFTS

SEQ ID NO: 428 - protein, 10 aa, Artificial Sequence
  Description of Artificial Sequence: Synthetic peptide
SIFSSSSSTS

SEQ ID NO: 429 - protein, 10 aa, Artificial Sequence
  Description of Artificial Sequence: Synthetic peptide
SIYPAPSSTP

SEQ ID NO: 430 - protein, 10 aa, Artificial Sequence
  Description of Artificial Sequence: Synthetic peptide
SIYPSYGSSF

SEQ ID NO: 431 - protein, 10 aa, Artificial Sequence
  Description of Artificial Sequence: Synthetic peptide
TIYPYYSSTL

SEQ ID NO: 432 - protein, 10 aa, Artificial Sequence
  Description of Artificial Sequence: Synthetic peptide
SIYSSYSSTY

SEQ ID NO: 433 - protein, 10 aa, Artificial Sequence
  Description of Artificial Sequence: Synthetic peptide
SIYPSYSVTY

SEQ ID NO: 434 - protein, 10 aa, Artificial Sequence
  Description of Artificial Sequence: Synthetic peptide
SIYPYYGSTF

SEQ ID NO: 435 - protein, 10 aa, Artificial Sequence
  Description of Artificial Sequence: Synthetic peptide
SIYPSYSSTF

SEQ ID NO: 436 - protein, 10 aa, Artificial Sequence
  Description of Artificial Sequence: Synthetic peptide
SIYPAYSSTY

SEQ ID NO: 437 - protein, 10 aa, Artificial Sequence
  Description of Artificial Sequence: Synthetic peptide
SIYSSYSSTF

SEQ ID NO: 438 - protein, 10 aa, Artificial Sequence
  Description of Artificial Sequence: Synthetic peptide
SIYSSYGSTY

SEQ ID NO: 439 - protein, 10 aa, Artificial Sequence
  Description of Artificial Sequence: Synthetic peptide
SIYPSYSSTY

SEQ ID NO: 440 - protein, 10 aa, Artificial Sequence
  Description of Artificial Sequence: Synthetic peptide
SIYSYYGSTY

SEQ ID NO: 441 - protein, 10 aa, Artificial Sequence
  Description of Artificial Sequence: Synthetic peptide
TIYSLFGATF

SEQ ID NO: 442 - protein, 10 aa, Artificial Sequence
  Description of Artificial Sequence: Synthetic peptide
SIYPAYGATF

SEQ ID NO: 443 - protein, 10 aa, Artificial Sequence
  Description of Artificial Sequence: Synthetic peptide
SIYPYYSSTY

SEQ ID NO: 444 - protein, 10 aa, Artificial Sequence
  Description of Artificial Sequence: Synthetic peptide
SIYPSFGSTY

SEQ ID NO: 445 - protein, 10 aa, Artificial Sequence
  Description of Artificial Sequence: Synthetic peptide
SIYPSFSPTY

SEQ ID NO: 446 - protein, 10 aa, Artificial Sequence
  Description of Artificial Sequence: Synthetic peptide
SIYSSYGSTF

SEQ ID NO: 447 - protein, 10 aa, Artificial Sequence
  Description of Artificial Sequence: Synthetic peptide
SIYPAYSPTY

SEQ ID NO: 448 - protein, 10 aa, Artificial Sequence
  Description of Artificial Sequence: Synthetic peptide
SIYSAYSSTF

SEQ ID NO: 449 - protein, 10 aa, Artificial Sequence
  Description of Artificial Sequence: Synthetic peptide
TIYPYYDPTY

SEQ ID NO: 450 - protein, 10 aa, Artificial Sequence
  Description of Artificial Sequence: Synthetic peptide
SIYPSYGSTY

SEQ ID NO: 451 - protein, 10 aa, Artificial Sequence
  Description of Artificial Sequence: Synthetic peptide
SIYPHYGATF

SEQ ID NO: 452 - protein, 10 aa, Artificial Sequence
  Description of Artificial Sequence: Synthetic peptide
SIYPSYGSTF

SEQ ID NO: 453 - protein, 10 aa, Artificial Sequence
  Description of Artificial Sequence: Synthetic peptide
SIYSSYSATY

SEQ ID NO: 454 - protein, 10 aa, Artificial Sequence
  Description of Artificial Sequence: Synthetic peptide
SIYPYYGPTY

SEQ ID NO: 455 - protein, 10 aa, Artificial Sequence
  Description of Artificial Sequence: Synthetic peptide
SIYPFYGSTF

SEQ ID NO: 456 - protein, 10 aa, Artificial Sequence
  Description of Artificial Sequence: Synthetic peptide
AIYPSYSSTN

SEQ ID NO: 457 - protein, 10 aa, Artificial Sequence
  Description of Artificial Sequence: Synthetic peptide
SIYPYYSSTH

SEQ ID NO: 458 - protein, 10 aa, Artificial Sequence
  Description of Artificial Sequence: Synthetic peptide
SIYPSYSTTY

SEQ ID NO: 459 - protein, 10 aa, Artificial Sequence
  Description of Artificial Sequence: Synthetic peptide
SIYSNYSSSY

SEQ ID NO: 460 - protein, 10 aa, Artificial Sequence
  Description of Artificial Sequence: Synthetic peptide
TIYPSYGSTY

SEQ ID NO: 461 - protein, 10 aa, Artificial Sequence
  Description of Artificial Sequence: Synthetic peptide
SIYPSFGSTF

SEQ ID NO: 462 - protein, 10 aa, Artificial Sequence
  Description of Artificial Sequence: Synthetic peptide
TIYPSYSSTY

SEQ ID NO: 463 - protein, 10 aa, Artificial Sequence
  Description of Artificial Sequence: Synthetic peptide
TIYSSYGATS

SEQ ID NO: 464 - protein, 10 aa, Artificial Sequence
  Description of Artificial Sequence: Synthetic peptide
SIYPSYSSTI

SEQ ID NO: 465 - protein, 10 aa, Artificial Sequence
  Description of Artificial Sequence: Synthetic peptide
TIYPYYGATY

SEQ ID NO: 466 - protein, 10 aa, Artificial Sequence
  Description of Artificial Sequence: Synthetic peptide
SIYSGYSATY

SEQ ID NO: 467 - protein, 10 aa, Artificial Sequence
  Description of Artificial Sequence: Synthetic peptide
SIYPSYSATF

SEQ ID NO: 468 - protein, 10 aa, Artificial Sequence
  Description of Artificial Sequence: Synthetic peptide
TIYPSYSSTF

SEQ ID NO: 469 - protein, 10 aa, Artificial Sequence
  Description of Artificial Sequence: Synthetic peptide
AIYSSYGSTY

SEQ ID NO: 470 - protein, 10 aa, Artificial Sequence
  Description of Artificial Sequence: Synthetic peptide
SIFPYYGSTY

SEQ ID NO: 471 - protein, 10 aa, Artificial Sequence
  Description of Artificial Sequence: Synthetic peptide
SIYPFYSTTF

SEQ ID NO: 472 - protein, 10 aa, Artificial Sequence
  Description of Artificial Sequence: Synthetic peptide
SIYPSYGSTS

SEQ ID NO: 473 - protein, 10 aa, Artificial Sequence
  Description of Artificial Sequence: Synthetic peptide
SIYPTYGSTV

SEQ ID NO: 474 - protein, 10 aa, Artificial Sequence
  Description of Artificial Sequence: Synthetic peptide
TIYPNYSSTY

SEQ ID NO: 475 - protein, 10 aa, Artificial Sequence
  Description of Artificial Sequence: Synthetic peptide
SIYPSYSATY

SEQ ID NO: 476 - protein, 10 aa, Artificial Sequence
  Description of Artificial Sequence: Synthetic peptide
SIYPGYSSTY

SEQ ID NO: 477 - protein, 10 aa, Artificial Sequence
  Description of Artificial Sequence: Synthetic peptide
SIYPSYSSTS

SEQ ID NO: 478 - protein, 10 aa, Artificial Sequence
  Description of Artificial Sequence: Synthetic peptide
SIYSGYGSTY

SEQ ID NO: 479 - protein, 10 aa, Artificial Sequence
  Description of Artificial Sequence: Synthetic peptide
SIYPSYGSTN

SEQ ID NO: 480 - protein, 10 aa, Artificial Sequence
  Description of Artificial Sequence: Synthetic peptide
SIYPTYGSAY

SEQ ID NO: 481 - protein, 10 aa, Artificial Sequence
  Description of Artificial Sequence: Synthetic peptide
TIYSSYGSTY

SEQ ID NO: 482 - protein, 10 aa, Artificial Sequence
  Description of Artificial Sequence: Synthetic peptide
AIYPYYGSTY

SEQ ID NO: 483 - protein, 4 aa, Artificial Sequence
  Description of Artificial Sequence: Synthetic peptide
YYAF

SEQ ID NO: 484 - protein, 4 aa, Artificial Sequence
  Description of Artificial Sequence: Synthetic peptide
YYAM

SEQ ID NO: 485 - protein, 4 aa, Artificial Sequence
  Description of Artificial Sequence: Synthetic peptide
YYGM

SEQ ID NO: 486 - protein, 4 aa, Artificial Sequence
  Description of Artificial Sequence: Synthetic peptide
YYGF

SEQ ID NO: 487 - protein, 4 aa, Artificial Sequence
  Description of Artificial Sequence: Synthetic peptide
YYAL

SEQ ID NO: 488 - protein, 4 aa, Artificial Sequence
  Description of Artificial Sequence: Synthetic peptide
FYAF

SEQ ID NO: 489 - protein, 4 aa, Artificial Sequence
  Description of Artificial Sequence: Synthetic peptide
YYAI

SEQ ID NO: 490 - protein, 4 aa, Artificial Sequence
  Description of Artificial Sequence: Synthetic peptide
YFAL

SEQ ID NO: 491 - protein, 7 aa, Artificial Sequence
  Description of Artificial Sequence: Synthetic peptide
SASDLYS

SEQ ID NO: 492 - protein, 6 aa, Artificial Sequence
  Description of Artificial Sequence: Synthetic peptide
ASYAPI

SEQ ID NO: 493 - protein, 8 aa, Artificial Sequence
  Description of Artificial Sequence: Synthetic peptide
YWAYYSPI

SEQ ID NO: 494 - protein, 7 aa, Artificial Sequence
  Description of Artificial Sequence: Synthetic peptide
SSSGHLI

SEQ ID NO: 495 - protein, 6 aa, Artificial Sequence
  Description of Artificial Sequence: Synthetic peptide
PYGYPI

SEQ ID NO: 496 - protein, 5 aa, Artificial Sequence
  Description of Artificial Sequence: Synthetic peptide
FHGLI

SEQ ID NO: 497 - protein, 5 aa, Artificial Sequence
  Description of Artificial Sequence: Synthetic peptide
YWFLI

SEQ ID NO: 498 - protein, 7 aa, Artificial Sequence
  Description of Artificial Sequence: Synthetic peptide
HSYGYPI

SEQ ID NO: 499 - protein, 7 aa, Artificial Sequence
  Description of Artificial Sequence: Synthetic peptide
YYAWYLI

SEQ ID NO: 500 - protein, 6 aa, Artificial Sequence
  Description of Artificial Sequence: Synthetic peptide
AAYSPI

SEQ ID NO: 501 - protein, 8 aa, Artificial Sequence
  Description of Artificial Sequence: Synthetic peptide
YYSWYPPF

SEQ ID NO: 502 - protein, 5 aa, Artificial Sequence
  Description of Artificial Sequence: Synthetic peptide
SFYPI

SEQ ID NO: 503 - protein, 6 aa, Artificial Sequence
  Description of Artificial Sequence: Synthetic peptide
YYWYPF

SEQ ID NO: 504 - protein, 5 aa, Artificial Sequence
  Description of Artificial Sequence: Synthetic peptide
WGSPI

SEQ ID NO: 505 - protein, 7 aa, Artificial Sequence
  Description of Artificial Sequence: Synthetic peptide
YSSWYLI

SEQ ID NO: 506 - protein, 5 aa, Artificial Sequence
  Description of Artificial Sequence: Synthetic peptide
GAYLI

SEQ ID NO: 507 - protein, 7 aa, Artificial Sequence
  Description of Artificial Sequence: Synthetic peptide
HFYYYPI

SEQ ID NO: 508 - protein, 6 aa, Artificial Sequence
  Description of Artificial Sequence: Synthetic peptide
AFHSPI

SEQ ID NO: 509 - protein, 5 aa, Artificial Sequence
  Description of Artificial Sequence: Synthetic peptide
AWYPI

SEQ ID NO: 510 - protein, 7 aa, Artificial Sequence
  Description of Artificial Sequence: Synthetic peptide
YAGAGLI

SEQ ID NO: 511 - protein, 6 aa, Artificial Sequence
  Description of Artificial Sequence: Synthetic peptide
SYSYPI

SEQ ID NO: 512 - protein, 7 aa, Artificial Sequence
  Description of Artificial Sequence: Synthetic peptide
YYRSRLI

SEQ ID NO: 513 - protein, 6 aa, Artificial Sequence
  Description of Artificial Sequence: Synthetic peptide
SYFYPI

SEQ ID NO: 514 - protein, 5 aa, Artificial Sequence
  Description of Artificial Sequence: Synthetic peptide
GFFPI

SEQ ID NO: 515 - protein, 6 aa, Artificial Sequence
  Description of Artificial Sequence: Synthetic peptide
SHSYPI

SEQ ID NO: 516 - protein, 6 aa, Artificial Sequence
  Description of Artificial Sequence: Synthetic peptide
RGSGPI

SEQ ID NO: 517 - protein, 7 aa, Artificial Sequence
  Description of Artificial Sequence: Synthetic peptide
RYSGGLI

SEQ ID NO: 518 - protein, 8 aa, Artificial Sequence
  Description of Artificial Sequence: Synthetic peptide
SARYYYLI

SEQ ID NO: 519 - protein, 8 aa, Artificial Sequence
  Description of Artificial Sequence: Synthetic peptide
SYRGYYLI

SEQ ID NO: 520 - protein, 6 aa, Artificial Sequence
  Description of Artificial Sequence: Synthetic peptide
FSWGLI

SEQ ID NO: 521 - protein, 6 aa, Artificial Sequence
  Description of Artificial Sequence: Synthetic peptide
YSWLPI

SEQ ID NO: 522 - protein, 5 aa, Artificial Sequence
  Description of Artificial Sequence: Synthetic peptide
FFRPI

SEQ ID NO: 523 - protein, 6 aa, Artificial Sequence
  Description of Artificial Sequence: Synthetic peptide
YSRRLF

SEQ ID NO: 524 - protein, 6 aa, Artificial Sequence
  Description of Artificial Sequence: Synthetic peptide
FIRVPI

SEQ ID NO: 525 - protein, 5 aa, Artificial Sequence
  Description of Artificial Sequence: Synthetic peptide
FYVPF

SEQ ID NO: 526 - protein, 6 aa, Artificial Sequence
  Description of Artificial Sequence: Synthetic peptide
GYSFGQ

SEQ ID NO: 527 - protein, 6 aa, Artificial Sequence
  Description of Artificial Sequence: Synthetic peptide
LSYYYM

SEQ ID NO: 528 - protein, 6 aa, Artificial Sequence
  Description of Artificial Sequence: Synthetic peptide
FSSSSI

SEQ ID NO: 529 - protein, 6 aa, Artificial Sequence
  Description of Artificial Sequence: Synthetic peptide
LYYYSM

SEQ ID NO: 530 - protein, 6 aa, Artificial Sequence
  Description of Artificial Sequence: Synthetic peptide
IYYYSM

SEQ ID NO: 531 - protein, 6 aa, Artificial Sequence
  Description of Artificial Sequence: Synthetic peptide
LYYYYI

SEQ ID NO: 532 - protein, 6 aa, Artificial Sequence
  Description of Artificial Sequence: Synthetic peptide
ISYYSM

SEQ ID NO: 533 - protein, 6 aa, Artificial Sequence
  Description of Artificial Sequence: Synthetic peptide
LSYYYI

SEQ ID NO: 534 - protein, 6 aa, Artificial Sequence
  Description of Artificial Sequence: Synthetic peptide
LYYSSM

SEQ ID NO: 535 - protein, 6 aa, Artificial Sequence
  Description of Artificial Sequence: Synthetic peptide
IYSSYI

SEQ ID NO: 536 - protein, 6 aa, Artificial Sequence
  Description of Artificial Sequence: Synthetic peptide
FTAYAM

SEQ ID NO: 537 - protein, 6 aa, Artificial Sequence
  Description of Artificial Sequence: Synthetic peptide
LGGYGI

SEQ ID NO: 538 - protein, 6 aa, Artificial Sequence
  Description of Artificial Sequence: Synthetic peptide
FASAWM

SEQ ID NO: 539 - protein, 6 aa, Artificial Sequence
  Description of Artificial Sequence: Synthetic peptide
IGGAAM

SEQ ID NO: 540 - protein, 6 aa, Artificial Sequence
  Description of Artificial Sequence: Synthetic peptide
FASYGM

SEQ ID NO: 541 - protein, 6 aa, Artificial Sequence
  Description of Artificial Sequence: Synthetic peptide
IAGSSI

SEQ ID NO: 542 - protein, 6 aa, Artificial Sequence
  Description of Artificial Sequence: Synthetic peptide
LTGDWM

SEQ ID NO: 543 - protein, 6 aa, Artificial Sequence
  Description of Artificial Sequence: Synthetic peptide
FTSYSM

SEQ ID NO: 544 - protein, 6 aa, Artificial Sequence
  Description of Artificial Sequence: Synthetic peptide
LNAAAM

SEQ ID NO: 545 - protein, 6 aa, Artificial Sequence
  Description of Artificial Sequence: Synthetic peptide
LAGAGM

SEQ ID NO: 546 - protein, 6 aa, Artificial Sequence
  Description of Artificial Sequence: Synthetic peptide
ISYYPM

SEQ ID NO: 547 - protein, 6 aa, Artificial Sequence
  Description of Artificial Sequence: Synthetic peptide
IVFGSI

SEQ ID NO: 548 - protein, 6 aa, Artificial Sequence
  Description of Artificial Sequence: Synthetic peptide
ISSNYI

SEQ ID NO: 549 - protein, 6 aa, Artificial Sequence
  Description of Artificial Sequence: Synthetic peptide
LTYTSM

SEQ ID NO: 550 - protein, 6 aa, Artificial Sequence
  Description of Artificial Sequence: Synthetic peptide
ITYYSM

SEQ ID NO: 551 - protein, 6 aa, Artificial Sequence
  Description of Artificial Sequence: Synthetic peptide
IADSSI

SEQ ID NO: 552 - protein, 10 aa, Artificial Sequence
  Description of Artificial Sequence: Synthetic peptide
SIYSSYGYTY

SEQ ID NO: 553 - protein, 10 aa, Artificial Sequence
  Description of Artificial Sequence: Synthetic peptide
SISSSYGYTY

SEQ ID NO: 554 - protein, 10 aa, Artificial Sequence
  Description of Artificial Sequence: Synthetic peptide
YISSYYSYTS

SEQ ID NO: 555 - protein, 10 aa, Artificial Sequence
  Description of Artificial Sequence: Synthetic peptide
SISSYYGYTS

SEQ ID NO: 556 - protein, 10 aa, Artificial Sequence
  Description of Artificial Sequence: Synthetic peptide
SIYSYSSYTS

SEQ ID NO: 557 - protein, 10 aa, Artificial Sequence
  Description of Artificial Sequence: Synthetic peptide
SISPYYGYTS

SEQ ID NO: 558 - protein, 10 aa, Artificial Sequence
  Description of Artificial Sequence: Synthetic peptide
SIYPSYGYTY

SEQ ID NO: 559 - protein, 10 aa, Artificial Sequence
  Description of Artificial Sequence: Synthetic peptide
SIYSYYSYTS

SEQ ID NO: 560 - protein, 10 aa, Artificial Sequence
  Description of Artificial Sequence: Synthetic peptide
SIYPYYGYTS

SEQ ID NO: 561 - protein, 10 aa, Artificial Sequence
  Description of Artificial Sequence: Synthetic peptide
SIYSYYSSTY

SEQ ID NO: 562 - protein, 10 aa, Artificial Sequence
  Description of Artificial Sequence: Synthetic peptide
SIYPSSGSTY

SEQ ID NO: 563 - protein, 10 aa, Artificial Sequence
  Description of Artificial Sequence: Synthetic peptide
YIYSYYGYTY

SEQ ID NO: 564 - protein, 10 aa, Artificial Sequence
  Description of Artificial Sequence: Synthetic peptide
YIYPYYGYTS

SEQ ID NO: 565 - protein, 10 aa, Artificial Sequence
  Description of Artificial Sequence: Synthetic peptide
SIYPYYGSTY

SEQ ID NO: 566 - protein, 10 aa, Artificial Sequence
  Description of Artificial Sequence: Synthetic peptide
SIYPSGGYTA

SEQ ID NO: 567 - protein, 10 aa, Artificial Sequence
  Description of Artificial Sequence: Synthetic peptide
GIYPSGGYTA

SEQ ID NO: 568 - protein, 10 aa, Artificial Sequence
  Description of Artificial Sequence: Synthetic peptide
RISPSGGYTA

SEQ ID NO: 569 - protein, 10 aa, Artificial Sequence
  Description of Artificial Sequence: Synthetic peptide
GISASGGATA

SEQ ID NO: 570 - protein, 10 aa, Artificial Sequence
  Description of Artificial Sequence: Synthetic peptide
GISTSGGATA

SEQ ID NO: 571 - protein, 10 aa, Artificial Sequence
  Description of Artificial Sequence: Synthetic peptide
GISASGGYTA

SEQ ID NO: 572 - protein, 10 aa, Artificial Sequence
  Description of Artificial Sequence: Synthetic peptide
GIYPSGGATA

SEQ ID NO: 573 - protein, 10 aa, Artificial Sequence
  Description of Artificial Sequence: Synthetic peptide
GIYPSGGSTA

SEQ ID NO: 574 - protein, 10 aa, Artificial Sequence
  Description of Artificial Sequence: Synthetic peptide
GISASRGATA

SEQ ID NO: 575 - protein, 10 aa, Artificial Sequence
  Description of Artificial Sequence: Synthetic peptide
RISTSGGYTA

SEQ ID NO: 576 - protein, 10 aa, Artificial Sequence
  Description of Artificial Sequence: Synthetic peptide
GIYASGGATA

SEQ ID NO: 577 - protein, 10 aa, Artificial Sequence
  Description of Artificial Sequence: Synthetic peptide
YISPYSGYTF

SEQ ID NO: 578 - protein, 10 aa, Artificial Sequence
  Description of Artificial Sequence: Synthetic peptide
HIAPYYGFTY

SEQ ID NO: 579 - protein, 10 aa, Artificial Sequence
  Description of Artificial Sequence: Synthetic peptide
SINPSYSYTF

SEQ ID NO: 580 - protein, 10 aa, Artificial Sequence
  Description of Artificial Sequence: Synthetic peptide
SISPFHGHTF

SEQ ID NO: 581 - protein, 10 aa, Artificial Sequence
  Description of Artificial Sequence: Synthetic peptide
SITSYYGNTD

SEQ ID NO: 582 - protein, 10 aa, Artificial Sequence
  Description of Artificial Sequence: Synthetic peptide
SIYPYYGFTD

SEQ ID NO: 583 - protein, 10 aa, Artificial Sequence
  Description of Artificial Sequence: Synthetic peptide
SISPYFSYTR

SEQ ID NO: 584 - protein, 11 aa, Artificial Sequence
  Description of Artificial Sequence: Synthetic peptide
WSHVSGHYSGM

SEQ ID NO: 585 - protein, 18 aa, Artificial Sequence
  Description of Artificial Sequence: Synthetic peptide
GGSGVSHYGSVYYSWWAL

SEQ ID NO: 586 - protein, 4 aa, Artificial Sequence
  Description of Artificial Sequence: Synthetic peptide
SWAM

SEQ ID NO: 587 - protein, 13 aa, Artificial Sequence
  Description of Artificial Sequence: Synthetic peptide
WSHVVGAHYGWAI

SEQ ID NO: 588 - protein, 13 aa, Artificial Sequence
  Description of Artificial Sequence: Synthetic peptide
SWWYWSYHGYAAM

SEQ ID NO: 589 - protein, 17 aa, Artificial Sequence
  Description of Artificial Sequence: Synthetic peptide
GYSYVWYGVYYHGYGAM

SEQ ID NO: 590 - protein, 8 aa, Artificial Sequence
  Description of Artificial Sequence: Synthetic peptide
SGYGWYAM

SEQ ID NO: 591 - protein, 10 aa, Artificial Sequence
  Description of Artificial Sequence: Synthetic peptide
SYYWGYWAAL

SEQ ID NO: 592 - protein, 16 aa, Artificial Sequence
  Description of Artificial Sequence: Synthetic peptide
GGVYYYPSYAGWPYGM

SEQ ID NO: 593 - protein, 9 aa, Artificial Sequence
  Description of Artificial Sequence: Synthetic peptide
HYAWWVGAF

SEQ ID NO: 594 - protein, 11 aa, Artificial Sequence
  Description of Artificial Sequence: Synthetic peptide
GGGAHGWGYSL

SEQ ID NO: 595 - protein, 18 aa, Artificial Sequence
  Description of Artificial Sequence: Synthetic peptide
SGPVYASYSWAWYYYGAL

SEQ ID NO: 596 - protein, 11 aa, Artificial Sequence
  Description of Artificial Sequence: Synthetic peptide
YSWGAYGYGAM

SEQ ID NO: 597 - protein, 13 aa, Artificial Sequence
  Description of Artificial Sequence: Synthetic peptide
YYYHYSVPVYAAL

SEQ ID NO: 598 - protein, 19 aa, Artificial Sequence
  Description of Artificial Sequence: Synthetic peptide
SPYYGFYYSGFYHWVFYGF

SEQ ID NO: 599 - protein, 9 aa, Artificial Sequence
  Description of Artificial Sequence: Synthetic peptide
AAWGWHPAF

SEQ ID NO: 600 - protein, 19 aa, Artificial Sequence
  Description of Artificial Sequence: Synthetic peptide
GGGFYYAGGWPYASYAWAF

SEQ ID NO: 601 - protein, 9 aa, Artificial Sequence
  Description of Artificial Sequence: Synthetic peptide
AWYSYYVGL

SEQ ID NO: 602 - protein, 18 aa, Artificial Sequence
  Description of Artificial Sequence: Synthetic peptide
GVYYGGGYWAGGYYPAAL

SEQ ID NO: 603 - protein, 7 aa, Artificial Sequence
  Description of Artificial Sequence: Synthetic peptide
RSYYFAL

SEQ ID NO: 604 - protein, 14 aa, Artificial Sequence
  Description of Artificial Sequence: Synthetic peptide
SSTYSSYYYHFYAL

SEQ ID NO: 605 - protein, 16 aa, Artificial Sequence
  Description of Artificial Sequence: Synthetic peptide
STRWHSAYAYYYSHAM

SEQ ID NO: 606 - protein, 14 aa, Artificial Sequence
  Description of Artificial Sequence: Synthetic peptide
SRPSWYWSYHYFAL

SEQ ID NO: 607 - protein, 9 aa, Artificial Sequence
  Description of Artificial Sequence: Synthetic peptide
SYYGYSRGF

SEQ ID NO: 608 - protein, 16 aa, Artificial Sequence
  Description of Artificial Sequence: Synthetic peptide
SYSFHYAWPRYHYGAL

SEQ ID NO: 609 - protein, 15 aa, Artificial Sequence
  Description of Artificial Sequence: Synthetic peptide
YDSGYYAWYYHDRAM

SEQ ID NO: 610 - protein, 8 aa, Artificial Sequence
  Description of Artificial Sequence: Synthetic peptide
FGSPHYGM

SEQ ID NO: 611 - protein, 11 aa, Artificial Sequence
  Description of Artificial Sequence: Synthetic peptide
PRYYAYYSGGF

SEQ ID NO: 612 - protein, 11 aa, Artificial Sequence
  Description of Artificial Sequence: Synthetic peptide
SHSSGSRSRGL

SEQ ID NO: 613 - protein, 10 aa, Artificial Sequence
  Description of Artificial Sequence: Synthetic peptide
YSFRYPSYAM

SEQ ID NO: 614 - protein, 7 aa, Artificial Sequence
  Description of Artificial Sequence: Synthetic peptide
GSRYSGF

SEQ ID NO: 615 - protein, 10 aa, Artificial Sequence
  Description of Artificial Sequence: Synthetic peptide
HYYFRWSRGM

SEQ ID NO: 616 - protein, 10 aa, Artificial Sequence
  Description of Artificial Sequence: Synthetic peptide
VNFIRRFRGM

SEQ ID NO: 617 - protein, 8 aa, Artificial Sequence
  Description of Artificial Sequence: Synthetic peptide
AVRRSQGI

SEQ ID NO: 618 - protein, 10 aa, Artificial Sequence
  Description of Artificial Sequence: Synthetic peptide
FPYFAWVGGM

SEQ ID NO: 619 - protein, 10 aa, Artificial Sequence
  Description of Artificial Sequence: Synthetic peptide
SHYFPWTVAL

SEQ ID NO: 620 - protein, 10 aa, Artificial Sequence
  Description of Artificial Sequence: Synthetic peptide
ASYHASFDGL

SEQ ID NO: 621 - protein, 10 aa, Artificial Sequence
  Description of Artificial Sequence: Synthetic peptide
TSIFKRFAGM

SEQ ID NO: 622 - protein, 6 aa, Artificial Sequence
  Description of Artificial Sequence: Synthetic peptide
YSWGPF

SEQ ID NO: 623 - protein, 5 aa, Artificial Sequence
  Description of Artificial Sequence: Synthetic peptide
YYWPI

SEQ ID NO: 624 - protein, 5 aa, Artificial Sequence
  Description of Artificial Sequence: Synthetic peptide
YYFLI

SEQ ID NO: 625 - protein, 8 aa, Artificial Sequence
  Description of Artificial Sequence: Synthetic peptide
YRYYWRPI

SEQ ID NO: 626 - protein, 6 aa, Artificial Sequence
  Description of Artificial Sequence: Synthetic peptide
GPWGLI

SEQ ID NO: 627 - protein, 6 aa, Artificial Sequence
  Description of Artificial Sequence: Synthetic peptide
RYSSPI

SEQ ID NO: 628 - protein, 8 aa, Artificial Sequence
  Description of Artificial Sequence: Synthetic peptide
YRYWYGPI

SEQ ID NO: 629 - protein, 6 aa, Artificial Sequence
  Description of Artificial Sequence: Synthetic peptide
YSWALF

SEQ ID NO: 630 - protein, 6 aa, Artificial Sequence
  Description of Artificial Sequence: Synthetic peptide
ISWGLI

SEQ ID NO: 631 - protein, 6 aa, Artificial Sequence
  Description of Artificial Sequence: Synthetic peptide
YFSYPI

SEQ ID NO: 632 - protein, 6 aa, Artificial Sequence
  Description of Artificial Sequence: Synthetic peptide
YRWALF

SEQ ID NO: 633 - protein, 6 aa, Artificial Sequence
  Description of Artificial Sequence: Synthetic peptide
YSRILF

SEQ ID NO: 634 - protein, 6 aa, Artificial Sequence
  Description of Artificial Sequence: Synthetic peptide
YSLRPI

SEQ ID NO: 635 - protein, 6 aa, Artificial Sequence
  Description of Artificial Sequence: Synthetic peptide
YSRGLI

SEQ ID NO: 636 - protein, 6 aa, Artificial Sequence
  Description of Artificial Sequence: Synthetic peptide
YFWGLI

SEQ ID NO: 637 - protein, 6 aa, Artificial Sequence
  Description of Artificial Sequence: Synthetic peptide
YSWGLI

SEQ ID NO: 638 - protein, 6 aa, Artificial Sequence
  Description of Artificial Sequence: Synthetic peptide
DSWGLF

SEQ ID NO: 639 - protein, 6 aa, Artificial Sequence
  Description of Artificial Sequence: Synthetic peptide
YYWGLI

SEQ ID NO: 640 - protein, 5 aa, Artificial Sequence
  Description of Artificial Sequence: Synthetic peptide
YYYLI

SEQ ID NO: 641 - protein, 5 aa, Artificial Sequence
  Description of Artificial Sequence: Synthetic peptide
YYILI

SEQ ID NO: 642 - protein, 5 aa, Artificial Sequence
  Description of Artificial Sequence: Synthetic peptide
HSFPI

SEQ ID NO: 643 - protein, 5 aa, Artificial Sequence
  Description of Artificial Sequence: Synthetic peptide
YHHLI

SEQ ID NO: 644 - protein, 5 aa, Artificial Sequence
  Description of Artificial Sequence: Synthetic peptide
YYSPI

SEQ ID NO: 645 - protein, 5 aa, Artificial Sequence
  Description of Artificial Sequence: Synthetic peptide
YYYPI

SEQ ID NO: 646 - protein, 5 aa, Artificial Sequence
  Description of Artificial Sequence: Synthetic peptide
YHFLI

SEQ ID NO: 647 - protein, 5 aa, Artificial Sequence
  Description of Artificial Sequence: Synthetic peptide
YYFPI

SEQ ID NO: 648 - protein, 5 aa, Artificial Sequence
  Description of Artificial Sequence: Synthetic peptide
YDFLI

SEQ ID NO: 649 - protein, 5 aa, Artificial Sequence
  Description of Artificial Sequence: Synthetic peptide
NSFLI

SEQ ID NO: 650 - protein, 5 aa, Artificial Sequence
  Description of Artificial Sequence: Synthetic peptide
YYNPI

SEQ ID NO: 651 - protein, 5 aa, Artificial Sequence
  Description of Artificial Sequence: Synthetic peptide
YGFLI

SEQ ID NO: 652 - protein, 5 aa, Artificial Sequence
  Description of Artificial Sequence: Synthetic peptide
YNFLI

SEQ ID NO: 653 - protein, 5 aa, Artificial Sequence
  Description of Artificial Sequence: Synthetic peptide
SSFLI

SEQ ID NO: 654 - protein, 5 aa, Artificial Sequence
  Description of Artificial Sequence: Synthetic peptide
YVFLI

SEQ ID NO: 655 - protein, 5 aa, Artificial Sequence
  Description of Artificial Sequence: Synthetic peptide
FYGPI

SEQ ID NO: 656 - protein, 5 aa, Artificial Sequence
  Description of Artificial Sequence: Synthetic peptide
YFFLI

SEQ ID NO: 657 - protein, 5 aa, Artificial Sequence
  Description of Artificial Sequence: Synthetic peptide
YYGPI

SEQ ID NO: 658 - protein, 5 aa, Artificial Sequence
  Description of Artificial Sequence: Synthetic peptide
YTLPI

SEQ ID NO: 659 - protein, 5 aa, Artificial Sequence
  Description of Artificial Sequence: Synthetic peptide
YRFPI

SEQ ID NO: 660 - protein, 5 aa, Artificial Sequence
  Description of Artificial Sequence: Synthetic peptide
YHLLI

SEQ ID NO: 661 - protein, 5 aa, Artificial Sequence
  Description of Artificial Sequence: Synthetic peptide
YSFPI

SEQ ID NO: 662 - protein, 5 aa, Artificial Sequence
  Description of Artificial Sequence: Synthetic peptide
YFLPI

SEQ ID NO: 663 - protein, 5 aa, Artificial Sequence
  Description of Artificial Sequence: Synthetic peptide
YDNLI

SEQ ID NO: 664 - protein, 5 aa, Artificial Sequence
  Description of Artificial Sequence: Synthetic peptide
YLFPI

SEQ ID NO: 665 - protein, 5 aa, Artificial Sequence
  Description of Artificial Sequence: Synthetic peptide
YFFPI

SEQ ID NO: 666 - protein, 5 aa, Artificial Sequence
  Description of Artificial Sequence: Synthetic peptide
YYIPI

SEQ ID NO: 667 - protein, 5 aa, Artificial Sequence
  Description of Artificial Sequence: Synthetic peptide
FNFLI

SEQ ID NO: 668 - protein, 5 aa, Artificial Sequence
  Description of Artificial Sequence: Synthetic peptide
YNYLI

SEQ ID NO: 669 - protein, 5 aa, Artificial Sequence
  Description of Artificial Sequence: Synthetic peptide
SYWPI

SEQ ID NO: 670 - protein, 5 aa, Artificial Sequence
  Description of Artificial Sequence: Synthetic peptide
YYRPI

SEQ ID NO: 671 - protein, 6 aa, Artificial Sequence
  Description of Artificial Sequence: Synthetic peptide
ASNNLI

SEQ ID NO: 672 - protein, 6 aa, Artificial Sequence
  Description of Artificial Sequence: Synthetic peptide
SAITPI

SEQ ID NO: 673 - protein, 6 aa, Artificial Sequence
  Description of Artificial Sequence: Synthetic peptide
FSYSPF

SEQ ID NO: 674 - protein, 6 aa, Artificial Sequence
  Description of Artificial Sequence: Synthetic peptide
SSYNLI

SEQ ID NO: 675 - protein, 6 aa, Artificial Sequence
  Description of Artificial Sequence: Synthetic peptide
SYNFPF

SEQ ID NO: 676 - protein, 6 aa, Artificial Sequence
  Description of Artificial Sequence: Synthetic peptide
SSTVPF

SEQ ID NO: 677 - protein, 6 aa, Artificial Sequence
  Description of Artificial Sequence: Synthetic peptide
SNYSLF

SEQ ID NO: 678 - protein, 6 aa, Artificial Sequence
  Description of Artificial Sequence: Synthetic peptide
STYSLI

SEQ ID NO: 679 - protein, 6 aa, Artificial Sequence
  Description of Artificial Sequence: Synthetic peptide
SAFSLI

SEQ ID NO: 680 - protein, 6 aa, Artificial Sequence
  Description of Artificial Sequence: Synthetic peptide
SSYTPI

SEQ ID NO: 681 - protein, 6 aa, Artificial Sequence
  Description of Artificial Sequence: Synthetic peptide
YSNSLI

SEQ ID NO: 682 - protein, 8 aa, Artificial Sequence
  Description of Artificial Sequence: Synthetic peptide
YWAYFSPI

SEQ ID NO: 683 - protein, 6 aa, Artificial Sequence
  Description of Artificial Sequence: Synthetic peptide
ISSYYI

SEQ ID NO: 684 - protein, 6 aa, Artificial Sequence
  Description of Artificial Sequence: Synthetic peptide
FSGDAM

SEQ ID NO: 685 - protein, 6 aa, Artificial Sequence
  Description of Artificial Sequence: Synthetic peptide
ISGAWM

SEQ ID NO: 686 - protein, 6 aa, Artificial Sequence
  Description of Artificial Sequence: Synthetic peptide
FTTYSI

SEQ ID NO: 687 - protein, 6 aa, Artificial Sequence
  Description of Artificial Sequence: Synthetic peptide
FAASGI

SEQ ID NO: 688 - protein, 6 aa, Artificial Sequence
  Description of Artificial Sequence: Synthetic peptide
IFFSSM

SEQ ID NO: 689 - protein, 6 aa, Artificial Sequence
  Description of Artificial Sequence: Synthetic peptide
IRYSSI

SEQ ID NO: 690 - protein, 6 aa, Artificial Sequence
  Description of Artificial Sequence: Synthetic peptide
LAYSSI

SEQ ID NO: 691 - protein, 6 aa, Artificial Sequence
  Description of Artificial Sequence: Synthetic peptide
LRYASM

SEQ ID NO: 692 - protein, 6 aa, Artificial Sequence
  Description of Artificial Sequence: Synthetic peptide
IFYSSI

SEQ ID NO: 693 - protein, 6 aa, Artificial Sequence
  Description of Artificial Sequence: Synthetic peptide
INYSSI

SEQ ID NO: 694 - protein, 6 aa, Artificial Sequence
  Description of Artificial Sequence: Synthetic peptide
IAFSSI

SEQ ID NO: 695 - protein, 6 aa, Artificial Sequence
  Description of Artificial Sequence: Synthetic peptide
LFYSSM

SEQ ID NO: 696 - protein, 6 aa, Artificial Sequence
  Description of Artificial Sequence: Synthetic peptide
ISFASM

SEQ ID NO: 697 - protein, 6 aa, Artificial Sequence
  Description of Artificial Sequence: Synthetic peptide
ISFYSI

SEQ ID NO: 698 - protein, 6 aa, Artificial Sequence
  Description of Artificial Sequence: Synthetic peptide
LFYASM

SEQ ID NO: 699 - protein, 6 aa, Artificial Sequence
  Description of Artificial Sequence: Synthetic peptide
IAYASI

SEQ ID NO: 700 - protein, 6 aa, Artificial Sequence
  Description of Artificial Sequence: Synthetic peptide
ISRSSI

SEQ ID NO: 701 - protein, 6 aa, Artificial Sequence
  Description of Artificial Sequence: Synthetic peptide
ISYASI

SEQ ID NO: 702 - protein, 6 aa, Artificial Sequence
  Description of Artificial Sequence: Synthetic peptide
LDYSSI

SEQ ID NO: 703 - protein, 6 aa, Artificial Sequence
  Description of Artificial Sequence: Synthetic peptide
LSYSAI

SEQ ID NO: 704 - protein, 6 aa, Artificial Sequence
  Description of Artificial Sequence: Synthetic peptide
LSGFGI

SEQ ID NO: 705 - protein, 6 aa, Artificial Sequence
  Description of Artificial Sequence: Synthetic peptide
LSFASM

SEQ ID NO: 706 - protein, 6 aa, Artificial Sequence
  Description of Artificial Sequence: Synthetic peptide
LAYNSI

SEQ ID NO: 707 - protein, 6 aa, Artificial Sequence
  Description of Artificial Sequence: Synthetic peptide
LYYSNI

SEQ ID NO: 708 - protein, 6 aa, Artificial Sequence
  Description of Artificial Sequence: Synthetic peptide
IHYYSI

SEQ ID NO: 709 - protein, 6 aa, Artificial Sequence
  Description of Artificial Sequence: Synthetic peptide
ISFASI

SEQ ID NO: 710 - protein, 6 aa, Artificial Sequence
  Description of Artificial Sequence: Synthetic peptide
LSYFSM

SEQ ID NO: 711 - protein, 6 aa, Artificial Sequence
  Description of Artificial Sequence: Synthetic peptide
ISYFSI

SEQ ID NO: 712 - protein, 6 aa, Artificial Sequence
  Description of Artificial Sequence: Synthetic peptide
LYYNSI

SEQ ID NO: 713 - protein, 6 aa, Artificial Sequence
  Description of Artificial Sequence: Synthetic peptide
LSYASI

SEQ ID NO: 714 - protein, 6 aa, Artificial Sequence
  Description of Artificial Sequence: Synthetic peptide
ISYASM

SEQ ID NO: 715 - protein, 6 aa, Artificial Sequence
  Description of Artificial Sequence: Synthetic peptide
ISYYSI

SEQ ID NO: 716 - protein, 6 aa, Artificial Sequence
  Description of Artificial Sequence: Synthetic peptide
LSHSSI

SEQ ID NO: 717 - protein, 6 aa, Artificial Sequence
  Description of Artificial Sequence: Synthetic peptide
IAYNSM

SEQ ID NO: 718 - protein, 6 aa, Artificial Sequence
  Description of Artificial Sequence: Synthetic peptide
ISLFFM

SEQ ID NO: 719 - protein, 6 aa, Artificial Sequence
  Description of Artificial Sequence: Synthetic peptide
IPSYFM

SEQ ID NO: 720 - protein, 6 aa, Artificial Sequence
  Description of Artificial Sequence: Synthetic peptide
ISSYFI

SEQ ID NO: 721 - protein, 6 aa, Artificial Sequence
  Description of Artificial Sequence: Synthetic peptide
LSSYYM

SEQ ID NO: 722 - protein, 6 aa, Artificial Sequence
  Description of Artificial Sequence: Synthetic peptide
LHSYYI

SEQ ID NO: 723 - protein, 6 aa, Artificial Sequence
  Description of Artificial Sequence: Synthetic peptide
IGSYYM

SEQ ID NO: 724 - protein, 6 aa, Artificial Sequence
  Description of Artificial Sequence: Synthetic peptide
LGSYYI

SEQ ID NO: 725 - protein, 6 aa, Artificial Sequence
  Description of Artificial Sequence: Synthetic peptide
LTSYYI

SEQ ID NO: 726 - protein, 6 aa, Artificial Sequence
  Description of Artificial Sequence: Synthetic peptide
ISTYYM

SEQ ID NO: 727 - protein, 6 aa, Artificial Sequence
  Description of Artificial Sequence: Synthetic peptide
IPLYTI

SEQ ID NO: 728 - protein, 6 aa, Artificial Sequence
  Description of Artificial Sequence: Synthetic peptide
IFSTSI

SEQ ID NO: 729 - protein, 6 aa, Artificial Sequence
  Description of Artificial Sequence: Synthetic peptide
ISYSTM

SEQ ID NO: 730 - protein, 6 aa, Artificial Sequence
  Description of Artificial Sequence: Synthetic peptide
LSSSGM

SEQ ID NO: 731 - protein, 6 aa, Artificial Sequence
  Description of Artificial Sequence: Synthetic peptide
IRGPSI

SEQ ID NO: 732 - protein, 6 aa, Artificial Sequence
  Description of Artificial Sequence: Synthetic peptide
FSSTYM

SEQ ID NO: 733 - protein, 6 aa, Artificial Sequence
  Description of Artificial Sequence: Synthetic peptide
INSSFM

SEQ ID NO: 734 - protein, 6 aa, Artificial Sequence
  Description of Artificial Sequence: Synthetic peptide
IFGYSM

SEQ ID NO: 735 - protein, 6 aa, Artificial Sequence
  Description of Artificial Sequence: Synthetic peptide
FSSSTI

SEQ ID NO: 736 - protein, 6 aa, Artificial Sequence
  Description of Artificial Sequence: Synthetic peptide
LSSSTM

SEQ ID NO: 737 - protein, 6 aa, Artificial Sequence
  Description of Artificial Sequence: Synthetic peptide
ISYTSI

SEQ ID NO: 738 - protein, 6 aa, Artificial Sequence
  Description of Artificial Sequence: Synthetic peptide
FSSSVM

SEQ ID NO: 739 - protein, 6 aa, Artificial Sequence
  Description of Artificial Sequence: Synthetic peptide
IASYSM

SEQ ID NO: 740 - protein, 6 aa, Artificial Sequence
  Description of Artificial Sequence: Synthetic peptide
FSYSSM

SEQ ID NO: 741 - protein, 10 aa, Artificial Sequence
  Description of Artificial Sequence: Synthetic peptide
SIYSSYGYTS

SEQ ID NO: 742 - protein, 10 aa, Artificial Sequence
  Description of Artificial Sequence: Synthetic peptide
SISPYYGYTY

SEQ ID NO: 743 - protein, 10 aa, Artificial Sequence
  Description of Artificial Sequence: Synthetic peptide
RISSSGGYTA

SEQ ID NO: 744 - protein, 10 aa, Artificial Sequence
  Description of Artificial Sequence: Synthetic peptide
RIYPSGGTTD

SEQ ID NO: 745 - protein, 10 aa, Artificial Sequence
  Description of Artificial Sequence: Synthetic peptide
GISTSGGYTD

SEQ ID NO: 746 - protein, 10 aa, Artificial Sequence
  Description of Artificial Sequence: Synthetic peptide
YISPSGGYTD

SEQ ID NO: 747 - protein, 10 aa, Artificial Sequence
  Description of Artificial Sequence: Synthetic peptide
GISSYYGFTY

SEQ ID NO: 748 - protein, 10 aa, Artificial Sequence
  Description of Artificial Sequence: Synthetic peptide
GIFSNYGPTT

SEQ ID NO: 749 - protein, 10 aa, Artificial Sequence
  Description of Artificial Sequence: Synthetic peptide
FISSYYSFTH

SEQ ID NO: 750 - protein, 10 aa, Artificial Sequence
  Description of Artificial Sequence: Synthetic peptide
SISSYYGFTY

SEQ ID NO: 751 - protein, 10 aa, Artificial Sequence
  Description of Artificial Sequence: Synthetic peptide
YIASFYGDTY

SEQ ID NO: 752 - protein, 10 aa, Artificial Sequence
  Description of Artificial Sequence: Synthetic peptide
HISPYYGYTH

SEQ ID NO: 753 - protein, 10 aa, Artificial Sequence
  Description of Artificial Sequence: Synthetic peptide
NITPYYGYTS

SEQ ID NO: 754 - protein, 10 aa, Artificial Sequence
  Description of Artificial Sequence: Synthetic peptide
GISSYYSYTY

SEQ ID NO: 755 - protein, 10 aa, Artificial Sequence
  Description of Artificial Sequence: Synthetic peptide
LITSYYGYTT

SEQ ID NO: 756 - protein, 10 aa, Artificial Sequence
  Description of Artificial Sequence: Synthetic peptide
FISPYYSFTN

SEQ ID NO: 757 - protein, 10 aa, Artificial Sequence
  Description of Artificial Sequence: Synthetic peptide
NITSYYGYTT

SEQ ID NO: 758 - protein, 10 aa, Artificial Sequence
  Description of Artificial Sequence: Synthetic peptide
SISPYYSYTS

SEQ ID NO: 759 - protein, 10 aa, Artificial Sequence
  Description of Artificial Sequence: Synthetic peptide
SISPYYGYTD

SEQ ID NO: 760 - protein, 10 aa, Artificial Sequence
  Description of Artificial Sequence: Synthetic peptide
SISSYYSYTD

SEQ ID NO: 761 - protein, 10 aa, Artificial Sequence
  Description of Artificial Sequence: Synthetic peptide
AIYSYYSYTI

SEQ ID NO: 762 - protein, 10 aa, Artificial Sequence
  Description of Artificial Sequence: Synthetic peptide
SISPYYGFTL

SEQ ID NO: 763 - protein, 10 aa, Artificial Sequence
  Description of Artificial Sequence: Synthetic peptide
SISSYYSYTY

SEQ ID NO: 764 - protein, 10 aa, Artificial Sequence
  Description of Artificial Sequence: Synthetic peptide
SISSYYGYTA

SEQ ID NO: 765 - protein, 10 aa, Artificial Sequence
  Description of Artificial Sequence: Synthetic peptide
GISSYYGYTR

SEQ ID NO: 766 - protein, 10 aa, Artificial Sequence
  Description of Artificial Sequence: Synthetic peptide
SISPYYGYTR

SEQ ID NO: 767 - protein, 10 aa, Artificial Sequence
  Description of Artificial Sequence: Synthetic peptide
SISPYYSYTT

SEQ ID NO: 768 - protein, 10 aa, Artificial Sequence
  Description of Artificial Sequence: Synthetic peptide
GISSYYSYTS

SEQ ID NO: 769 - protein, 10 aa, Artificial Sequence
  Description of Artificial Sequence: Synthetic peptide
SISPYYSFTS

SEQ ID NO: 770 - protein, 10 aa, Artificial Sequence
  Description of Artificial Sequence: Synthetic peptide
FISSYYGYTA

SEQ ID NO: 771 - protein, 10 aa, Artificial Sequence
  Description of Artificial Sequence: Synthetic peptide
SISSYYGYTP

SEQ ID NO: 772 - protein, 10 aa, Artificial Sequence
  Description of Artificial Sequence: Synthetic peptide
SIFSYYSYTN

SEQ ID NO: 773 - protein, 10 aa, Artificial Sequence
  Description of Artificial Sequence: Synthetic peptide
SISSYYGYTL

SEQ ID NO: 774 - protein, 10 aa, Artificial Sequence
  Description of Artificial Sequence: Synthetic peptide
YISSYYGYTS

SEQ ID NO: 775 - protein, 10 aa, Artificial Sequence
  Description of Artificial Sequence: Synthetic peptide
SISPYYSFTD

SEQ ID NO: 776 - protein, 10 aa, Artificial Sequence
  Description of Artificial Sequence: Synthetic peptide
SIYSYYSFTN

SEQ ID NO: 777 - protein, 10 aa, Artificial Sequence
  Description of Artificial Sequence: Synthetic peptide
SIYSYYGFTN

SEQ ID NO: 778 - protein, 10 aa, Artificial Sequence
  Description of Artificial Sequence: Synthetic peptide
TISPYYGYTS

SEQ ID NO: 779 - protein, 10 aa, Artificial Sequence
  Description of Artificial Sequence: Synthetic peptide
HISSYYGFTS

SEQ ID NO: 780 - protein, 10 aa, Artificial Sequence
  Description of Artificial Sequence: Synthetic peptide
AIHPYYGYTS

SEQ ID NO: 781 - protein, 10 aa, Artificial Sequence
  Description of Artificial Sequence: Synthetic peptide
SISSYYGYTG

SEQ ID NO: 782 - protein, 10 aa, Artificial Sequence
  Description of Artificial Sequence: Synthetic peptide
SISPYYGFTY

SEQ ID NO: 783 - protein, 10 aa, Artificial Sequence
  Description of Artificial Sequence: Synthetic peptide
SISSYYGYTD

SEQ ID NO: 784 - protein, 10 aa, Artificial Sequence
  Description of Artificial Sequence: Synthetic peptide
SIYSYYGYTT

SEQ ID NO: 785 - protein, 10 aa, Artificial Sequence
  Description of Artificial Sequence: Synthetic peptide
SISSHYGYTH

SEQ ID NO: 786 - protein, 10 aa, Artificial Sequence
  Description of Artificial Sequence: Synthetic peptide
YISSYYGYTA

SEQ ID NO: 787 - protein, 10 aa, Artificial Sequence
  Description of Artificial Sequence: Synthetic peptide
SISSYYGYTY

SEQ ID NO: 788 - protein, 10 aa, Artificial Sequence
  Description of Artificial Sequence: Synthetic peptide
SIYSSYSYTS

SEQ ID NO: 789 - protein, 10 aa, Artificial Sequence
  Description of Artificial Sequence: Synthetic peptide
SIYSSYSYTA

SEQ ID NO: 790 - protein, 10 aa, Artificial Sequence
  Description of Artificial Sequence: Synthetic peptide
SIYSSYSYTG

SEQ ID NO: 791 - protein, 10 aa, Artificial Sequence
  Description of Artificial Sequence: Synthetic peptide
SIYPSYSYTS

SEQ ID NO: 792 - protein, 10 aa, Artificial Sequence
  Description of Artificial Sequence: Synthetic peptide
SIYSRFSYTA

SEQ ID NO: 793 - protein, 10 aa, Artificial Sequence
  Description of Artificial Sequence: Synthetic peptide
NIYSSYGYTS

SEQ ID NO: 794 - protein, 10 aa, Artificial Sequence
  Description of Artificial Sequence: Synthetic peptide
AIYSPYGYTS

SEQ ID NO: 795 - protein, 10 aa, Artificial Sequence
  Description of Artificial Sequence: Synthetic peptide
TIYSYYSYTS

SEQ ID NO: 796 - protein, 10 aa, Artificial Sequence
  Description of Artificial Sequence: Synthetic peptide
SIYSSFGYTS

SEQ ID NO: 797 - protein, 10 aa, Artificial Sequence
  Description of Artificial Sequence: Synthetic peptide
SISPSYSYTY

SEQ ID NO: 798 - protein, 10 aa, Artificial Sequence
  Description of Artificial Sequence: Synthetic peptide
SITSAYSYTY

SEQ ID NO: 799 - protein, 10 aa, Artificial Sequence
  Description of Artificial Sequence: Synthetic peptide
SIVSSYSRTY

SEQ ID NO: 800 - protein, 10 aa, Artificial Sequence
  Description of Artificial Sequence: Synthetic peptide
AIYPFDGYTY

SEQ ID NO: 801 - protein, 10 aa, Artificial Sequence
  Description of Artificial Sequence: Synthetic peptide
GIFSYFSYTY

SEQ ID NO: 802 - protein, 10 aa, Artificial Sequence
  Description of Artificial Sequence: Synthetic peptide
SISPFCGFTY

SEQ ID NO: 803 - protein, 10 aa, Artificial Sequence
  Description of Artificial Sequence: Synthetic peptide
SITPSYGYTN

SEQ ID NO: 804 - protein, 10 aa, Artificial Sequence
  Description of Artificial Sequence: Synthetic peptide
SISPSYGYTY

SEQ ID NO: 805 - protein, 10 aa, Artificial Sequence
  Description of Artificial Sequence: Synthetic peptide
SIFPCCSNTY

SEQ ID NO: 806 - protein, 10 aa, Artificial Sequence
  Description of Artificial Sequence: Synthetic peptide
SIAPSFGHTY

SEQ ID NO: 807 - protein, 10 aa, Artificial Sequence
  Description of Artificial Sequence: Synthetic peptide
SISPYYSYTR

SEQ ID NO: 808 - protein, 10 aa, Artificial Sequence
  Description of Artificial Sequence: Synthetic peptide
SIFSTYSYTY

SEQ ID NO: 809 - protein, 10 aa, Artificial Sequence
  Description of Artificial Sequence: Synthetic peptide
SIAPSYSFTY

SEQ ID NO: 810 - protein, 10 aa, Artificial Sequence
  Description of Artificial Sequence: Synthetic peptide
SITPYYSTTS

SEQ ID NO: 811 - protein, 10 aa, Artificial Sequence
  Description of Artificial Sequence: Synthetic peptide
FISPYHSYTD

SEQ ID NO: 812 - protein, 10 aa, Artificial Sequence
  Description of Artificial Sequence: Synthetic peptide
SISSRYGYTY

SEQ ID NO: 813 - protein, 10 aa, Artificial Sequence
  Description of Artificial Sequence: Synthetic peptide
AHYFPWAGAM

SEQ ID NO: 814 - protein, 15 aa, Artificial Sequence
  Description of Artificial Sequence: Synthetic peptide
TVRGSKKPYFSGWAM

SEQ ID NO: 815 - protein, 10 aa, Artificial Sequence
  Description of Artificial Sequence: Synthetic peptide
SSYFPWFSAM

SEQ ID NO: 816 - protein, 13 aa, Artificial Sequence
  Description of Artificial Sequence: Synthetic peptide
ASYYSNYYYGPAM

SEQ ID NO: 817 - protein, 18 aa, Artificial Sequence
  Description of Artificial Sequence: Synthetic peptide
GWFSFRSYYRSYYYYSAL

SEQ ID NO: 818 - protein, 15 aa, Artificial Sequence
  Description of Artificial Sequence: Synthetic peptide
SGHPRYYSRRHSYGM

SEQ ID NO: 819 - protein, 13 aa, Artificial Sequence
  Description of Artificial Sequence: Synthetic peptide
SYYSNYYYYYDAM

SEQ ID NO: 820 - protein, 10 aa, Artificial Sequence
  Description of Artificial Sequence: Synthetic peptide
AHYFPWAGAL

SEQ ID NO: 821 - protein, 10 aa, Artificial Sequence
  Description of Artificial Sequence: Synthetic peptide
AHYFRRARGL

SEQ ID NO: 822 - protein, 10 aa, Artificial Sequence
  Description of Artificial Sequence: Synthetic peptide
SHYFPWAGAM

SEQ ID NO: 823 - protein, 10 aa, Artificial Sequence
  Description of Artificial Sequence: Synthetic peptide
AHYFPWAGGM

SEQ ID NO: 824 - protein, 10 aa, Artificial Sequence
  Description of Artificial Sequence: Synthetic peptide
SYYYPRSRGM

SEQ ID NO: 825 - protein, 10 aa, Artificial Sequence
  Description of Artificial Sequence: Synthetic peptide
SHYFPWAVAM

SEQ ID NO: 826 - protein, 10 aa, Artificial Sequence
  Description of Artificial Sequence: Synthetic peptide
SHYFPWFAAM

SEQ ID NO: 827 - protein, 10 aa, Artificial Sequence
  Description of Artificial Sequence: Synthetic peptide
ANYFPWAYAM

SEQ ID NO: 828 - protein, 10 aa, Artificial Sequence
  Description of Artificial Sequence: Synthetic peptide
AHYFPWVVGM

SEQ ID NO: 829 - protein, 10 aa, Artificial Sequence
  Description of Artificial Sequence: Synthetic peptide
SHYFPWAGAL

SEQ ID NO: 830 - protein, 10 aa, Artificial Sequence
  Description of Artificial Sequence: Synthetic peptide
SSYFPWFSAL

SEQ ID NO: 831 - protein, 10 aa, Artificial Sequence
  Description of Artificial Sequence: Synthetic peptide
SSYFPWLSDM

SEQ ID NO: 832 - protein, 10 aa, Artificial Sequence
  Description of Artificial Sequence: Synthetic peptide
SSYFPWVSGM

SEQ ID NO: 833 - protein, 10 aa, Artificial Sequence
  Description of Artificial Sequence: Synthetic peptide
SSYLPWFSAL

SEQ ID NO: 834 - protein, 10 aa, Artificial Sequence
  Description of Artificial Sequence: Synthetic peptide
SSYFPWFTAL

SEQ ID NO: 835 - protein, 10 aa, Artificial Sequence
  Description of Artificial Sequence: Synthetic peptide
SSYFPWVGGF

SEQ ID NO: 836 - protein, 10 aa, Artificial Sequence
  Description of Artificial Sequence: Synthetic peptide
SSRFPWFYGL

SEQ ID NO: 837 - protein, 10 aa, Artificial Sequence
  Description of Artificial Sequence: Synthetic peptide
SSYFPWSSAM

SEQ ID NO: 838 - protein, 10 aa, Artificial Sequence
  Description of Artificial Sequence: Synthetic peptide
SHYFPWLSAL

SEQ ID NO: 839 - protein, 10 aa, Artificial Sequence
  Description of Artificial Sequence: Synthetic peptide
ASYYPWFSAM

SEQ ID NO: 840 - protein, 10 aa, Artificial Sequence
  Description of Artificial Sequence: Synthetic peptide
SSYIPWRYAI

SEQ ID NO: 841 - protein, 10 aa, Artificial Sequence
  Description of Artificial Sequence: Synthetic peptide
SSYFPWISAM

SEQ ID NO: 842 - protein, 10 aa, Artificial Sequence
  Description of Artificial Sequence: Synthetic peptide
SSYFPWISAL

SEQ ID NO: 843 - protein, 10 aa, Artificial Sequence
  Description of Artificial Sequence: Synthetic peptide
SSRFPWISGM

SEQ ID NO: 844 - protein, 10 aa, Artificial Sequence
  Description of Artificial Sequence: Synthetic peptide
SPYFPWSSAL

SEQ ID NO: 845 - protein, 10 aa, Artificial Sequence
  Description of Artificial Sequence: Synthetic peptide
ASYLPWFSAM

SEQ ID NO: 846 - protein, 10 aa, Artificial Sequence
  Description of Artificial Sequence: Synthetic peptide
SSYLPWITAM

SEQ ID NO: 847 - protein, 10 aa, Artificial Sequence
  Description of Artificial Sequence: Synthetic peptide
SAYFPWFAAL

SEQ ID NO: 848 - protein, 10 aa, Artificial Sequence
  Description of Artificial Sequence: Synthetic peptide
SSYFPWFFAM

SEQ ID NO: 849 - protein, 10 aa, Artificial Sequence
  Description of Artificial Sequence: Synthetic peptide
SSHFPWVSAL

SEQ ID NO: 850 - protein, 10 aa, Artificial Sequence
  Description of Artificial Sequence: Synthetic peptide
SSYFPWVSAM

SEQ ID NO: 851 - protein, 10 aa, Artificial Sequence
  Description of Artificial Sequence: Synthetic peptide
SSHFPWFSAM

SEQ ID NO: 852 - protein, 10 aa, Artificial Sequence
  Description of Artificial Sequence: Synthetic peptide
SSYFPWFSAI

SEQ ID NO: 853 - protein, 10 aa, Artificial Sequence
  Description of Artificial Sequence: Synthetic peptide
SSRFPWFPAM

SEQ ID NO: 854 - protein, 10 aa, Artificial Sequence
  Description of Artificial Sequence: Synthetic peptide
SSYVPWFYAL

SEQ ID NO: 855 - protein, 10 aa, Artificial Sequence
  Description of Artificial Sequence: Synthetic peptide
ASYFPWFPAM

SEQ ID NO: 856 - protein, 10 aa, Artificial Sequence
  Description of Artificial Sequence: Synthetic peptide
SSYFPWFFAL

SEQ ID NO: 857 - protein, 10 aa, Artificial Sequence
  Description of Artificial Sequence: Synthetic peptide
SSYYPWFSAL

SEQ ID NO: 858 - protein, 10 aa, Artificial Sequence
  Description of Artificial Sequence: Synthetic peptide
SSYLPWVSAL

SEQ ID NO: 859 - protein, 15 aa, Artificial Sequence
  Description of Artificial Sequence: Synthetic peptide
SFNGAKKPYFSGWAM

SEQ ID NO: 860 - protein, 15 aa, Artificial Sequence
  Description of Artificial Sequence: Synthetic peptide
NVVVSRKPYFFRSAM

SEQ ID NO: 861 - protein, 15 aa, Artificial Sequence
  Description of Artificial Sequence: Synthetic peptide
TVPGSKRPYFASLAI

SEQ ID NO: 862 - protein, 15 aa, Artificial Sequence
  Description of Artificial Sequence: Synthetic peptide
NVRGFRKPYFSRWAM

SEQ ID NO: 863 - protein, 15 aa, Artificial Sequence
  Description of Artificial Sequence: Synthetic peptide
NVPGIKRPYFTAWAM

SEQ ID NO: 864 - protein, 15 aa, Artificial Sequence
  Description of Artificial Sequence: Synthetic peptide
TIRGSKRPYFAASGL

SEQ ID NO: 865 - protein, 15 aa, Artificial Sequence
  Description of Artificial Sequence: Synthetic peptide
TARENKKPYFSGWAM

SEQ ID NO: 866 - protein, 15 aa, Artificial Sequence
  Description of Artificial Sequence: Synthetic peptide
TLPLSKKPYFSLWAF

SEQ ID NO: 867 - protein, 15 aa, Artificial Sequence
  Description of Artificial Sequence: Synthetic peptide
TFHGSKKPYFSGRAM

SEQ ID NO: 868 - protein, 15 aa, Artificial Sequence
  Description of Artificial Sequence: Synthetic peptide
SIRGSKKPYFSRLAL

SEQ ID NO: 869 - protein, 15 aa, Artificial Sequence
  Description of Artificial Sequence: Synthetic peptide
SVRGSKKPYFSHWAM

SEQ ID NO: 870 - protein, 15 aa, Artificial Sequence
  Description of Artificial Sequence: Synthetic peptide
NVRTSKKPYFPLWAM

SEQ ID NO: 871 - protein, 18 aa, Artificial Sequence
  Description of Artificial Sequence: Synthetic peptide
GVSGGSNYISIFRNSSGM

SEQ ID NO: 872 - protein, 18 aa, Artificial Sequence
  Description of Artificial Sequence: Synthetic peptide
GGLSVSHYNYVHSFKWGL

SEQ ID NO: 873 - protein, 18 aa, Artificial Sequence
  Description of Artificial Sequence: Synthetic peptide
SCSSFCNYVSNYNARRAL

SEQ ID NO: 874 - protein, 18 aa, Artificial Sequence
  Description of Artificial Sequence: Synthetic peptide
GNARVSNYISSYYAWRAM

SEQ ID NO: 875 - protein, 18 aa, Artificial Sequence
  Description of Artificial Sequence: Synthetic peptide
GGYGFSYYNSVTFYRWAF

SEQ ID NO: 876 - protein, 18 aa, Artificial Sequence
  Description of Artificial Sequence: Synthetic peptide
VGSGVCNSLHNYFYKRGM

SEQ ID NO: 877 - protein, 18 aa, Artificial Sequence
  Description of Artificial Sequence: Synthetic peptide
SSSDISIDNSIRYTWGAM

SEQ ID NO: 878 - protein, 18 aa, Artificial Sequence
  Description of Artificial Sequence: Synthetic peptide
GHSGVTNFISFYYRRRAM

SEQ ID NO: 879 - protein, 18 aa, Artificial Sequence
  Description of Artificial Sequence: Synthetic peptide
GVSGLDNNRTASYSRMGM

SEQ ID NO: 880 - protein, 18 aa, Artificial Sequence
  Description of Artificial Sequence: Synthetic peptide
GAASVNHIGSLYVSWRGL

SEQ ID NO: 881 - protein, 18 aa, Artificial Sequence
  Description of Artificial Sequence: Synthetic peptide
HGSGLSHNATTSYYRSAI

SEQ ID NO: 882 - protein, 18 aa, Artificial Sequence
  Description of Artificial Sequence: Synthetic peptide
SSSAVSRNSIVYYSRTAM

SEQ ID NO: 883 - protein, 18 aa, Artificial Sequence
  Description of Artificial Sequence: Synthetic peptide
GVCRVSNYSSYFYSRGAM

SEQ ID NO: 884 - protein, 18 aa, Artificial Sequence
  Description of Artificial Sequence: Synthetic peptide
AISHVAHYDNVIYSKWGI

SEQ ID NO: 885 - protein, 18 aa, Artificial Sequence
  Description of Artificial Sequence: Synthetic peptide
GHSVLSNYVSIHYYWAGF

SEQ ID NO: 886 - protein, 5 aa, Artificial Sequence
  Description of Artificial Sequence: Synthetic peptide
GGGGS

SEQ ID NO: 887 - protein, 14 aa, Artificial Sequence
  Description of Artificial Sequence: Synthetic peptide
LEDKTHTKVEPKSS

SEQ ID NO: 888 - protein, 19 aa, Artificial Sequence
  Description of Artificial Sequence: Synthetic peptide
SGSETPGTSESATPESGGG

SEQ ID NO: 889 - protein, 16 aa, Artificial Sequence
  Description of Artificial Sequence: Synthetic peptide
GTTAASGSSGGSSSGA

SEQ ID NO: 890 - protein, 15 aa, Artificial Sequence
  Description of Artificial Sequence: Synthetic peptide
GGGGSGGGGSEPKSS

SEQ ID NO: 891 - protein, 20 aa, Artificial Sequence
  Description of Artificial Sequence: Synthetic peptide
GGGSGGGSGGGSGGGSGSTG

SEQ ID NO: 892 - protein, 20 aa, Artificial Sequence
  Description of Artificial Sequence: Synthetic peptide
GGGGSGGGGSEPKSSDKTHT

SEQ ID NO: 893 - protein, 6 aa, Artificial Sequence
  Description of Artificial Sequence: Synthetic peptide
IHSSSI

SEQ ID NO: 894 - protein, 10 aa, Artificial Sequence
  Description of Artificial Sequence: Synthetic peptide
ATYSSFGSIT

SEQ ID NO: 895 - protein, 9 aa, Artificial Sequence
  Description of Artificial Sequence: Synthetic peptide
YHHPFGYAL

SEQ ID NO: 896 - protein, 5 aa, Artificial Sequence
  Description of Artificial Sequence: Synthetic peptide
GVYLF

SEQ ID NO: 897 - protein, 721 aa, Artificial Sequence
  Description of Artificial Sequence: Synthetic polypeptide
EVQLVESGGGLVQPGGSLRLSCAASGFDFTAYAMHWVRQAPGKGLEWVASIYPSGGYTAYADSVKGRFTISADTSKNTAYLQMNSLRAEDTAVYYCARRSYYFALDYWGQGTLVTVSSGGGGSDIQMTQSPSSLSASVGDRVTITCRASQSVSSAVAWYQQKPGKAPKLLIYSASSLYSGVPSRFSGSRSGTDFTLTISSLQPEDFATYYCQQYWAYYSPITFGQGTKVEIKGGGGSGGGGSEPKTSDKTHTCPPCPAPELLGGPSVFLFPPKPKDTLMISRTPEVTCVVVAVSHEDPEVKFNWYVDGVEVHNAKTKPREEQYGSTYRVVSVLTVLHQDWLNGKEYKCKVSNKALPAPIEKTISKAKGQPREPMVFDLPPSREEMTKNQVSLWCMVKGFYPSDIAVEWESNGQPENNYKTTPPVLDSDGSFFLYSKLTVDKSRWQQGNVFSCSVMHEALHNHYTQKSLSLSPGKGGGSGGGSGGGSGGGSGSTGEVQLVESGGGLVQPGGSLRLSCAASGFTLSSYSMHWVRQAPGKGLEWVAYISSYYGYTYYADSVKGRFTISADTSKNTAYLQMNSLRAEDTAVYYCARPAPGHWGFDYWGQGTLVTVSSASTKGPSVFPLAPSSKSTSGGTAALGCLVKDYFPEPVTVSWNSGALTSGVHTFPAVLQSSGLYSLSSVVTVPSSSLGTQTYICNVNHKPSNTKVDKKVEPKSCDKTHT

SEQ ID NO: 898 - protein, 717 aa, Artificial Sequence
  Description of Artificial Sequence: Synthetic polypeptide
EVQLVESGGGLVQPGGSLRLSCAASGFDFSSSSIHWVRQAPGKGLEWVASISSSYGYTYYADSVKGRFTISADTSKNTAYLQMNSLRAEDTAVYYCARSWAMDYWGQGTLVTVSSGGGGSDIQMTQSPSSLSASVGDRVTITCRASQSVSSAVAWYQQKPGKAPKLLIYSASDLYSGVPSRFSGSRSGTDFTLTISSLQPEDFATYYCQQYAGAGLITFGQGTKVEIKGGGGSGGGGSEPKSSDKTHTCPPCPAPELLGGPSVFLFPPKPKDTLMISRTPEVTCVVVAVSHEDPEVKFNWYVDGVEVHNAKTKPREEQYGSTYRVVSVLTVLHQDWLNGKEYKCKVSNKALPAPIEKTISKAKGQPREPQVYTLPPIRELMTSNQVSLSCAVKGFYPSDIAVEWESNGQPENNYKTTPPVLDSDGSFFLVSKLTVDKSRWQQGNVFSCSVMHEALHNHYTQKSLSLSPGKGGGSGGGSGGGSGGGSGSTGEVQLVESGGGLVQPGGSLRLSCAASGFTLSSYSMHWVRQAPGKGLEWVAYISSYYGYTYYADSVKGRFTISADTSKNTAYLQMNSLRAEDTAVYYCARPAPGHWGFDYWGQGTLVTVSSASTKGPSVFPLAPSSKSTSGGTAALGCLVKDYFPEPVTVSWNSGALTSGVHTFPAVLQSSGLYSLSSVVTVPSSSLGTQTYICNVNHKPSNTKVDKKVEPKSCDKTHT

SEQ ID NO: 899 - protein, 214 aa, Artificial Sequence
  Description of Artificial Sequence: Synthetic polypeptide
DIQMTQSPSSLSASVGDRVTITCRASQSVSSAVAWYQQKPGKAPKLLIYSASSLYSGVPSRFSGSRSGTDFTLTISSLQPEDFATYYCQQWYYAPITFGQGTKVEIKRTVAAPSVFIFPPSDEQLKSGTASVVCLLNNFYPREAKVQWKVDNALQSGNSQESVTEQDSKDSTYSLSSTLTLSKADYEKHKVYACEVTHQGLSSPVTKSFNRGEC

SEQ ID NO: 900 - protein, 745 aa, Artificial Sequence
  Description of Artificial Sequence: Synthetic polypeptide
MNLLLILTFVAAAVAEVQLVESGGGMVQPGGSLRLSCAASGFNFSSSSIHWVRQAPGKGLEWVASISSSYGYTYYADSVKGRFTISADTSKNTAYLQMNSLRAEDTAVYYCARGGSGVSHYGSVYYSWWALDYWGQGTLVTVSSGGGGSDIQMTQSPSSLSASVGDRVTITCRASQSVSSAVAWYQQKPGKAPKLLIYSASSLYSGVPSRFSGSRSGTDFTLTISSLQPEDFATYYCQQASYAPITFGQGTKVEIKGGGGSGGGGSEPKTSDKTHTCPPCPAPELLGGPSVFLFPPKPKDTLMISRTPEVTCVVVAVSHEDPEVKFNWYVDGVEVHNAKTKPREEQYGSTYRVVSVLTVLHQDWLNGKEYKCKVSNKALPAPIEKTISKAKGQPREPMVFDLPPSREEMTKNQVSLWCMVKGFYPSDIAVEWESNGQPENNYKTTPPVLDSDGSFFLYSKLTVDKSRWQQGNVFSCSVMHEALHNHYTQKSLSLSPGKGGGSGGGSGGGSGGGSGSTGEVQLVESGGGLVQPGGSLRLSCAASGFTLSSYSMHWVRQAPGKGLEWVAYISSYYGYTYYADSVKGRFTISADTSKNTAYLQMNSLRAEDTAVYYCARPAPGHWGFDYWGQGTLVTVSSASTKGPSVFPLAPSSKSTSGGTAALGCLVKDYFPEPVTVSWNSGALTSGVHTFPAVLQSSGLYSLSSVVTVPSSSLGTQTYICNVNHKPSNTKVDKKVEPKSCDKTHT

SEQ ID NO: 901 - protein, 738 aa, Artificial Sequence
  Description of Artificial Sequence: Synthetic polypeptide
MNLLLILTFVAAAVAEVQLVESGGGLVQPGGSLRLSCAASGFNLSYYYMHWVRQAPGKGLEWVASIYSSYGYTYYADSVKGRFTISADTSKNTAYLQMNSLRAEDTAVYYCARWSHVSGHYSGMDYWGQGTLVTVSSGGGGSDIQMTQSPSSLSASVGDRVTITCRASQSVSSAVAWYQQKPGKAPKLLIYSASSLYSGVPSRFSGSRSGTDFTLTISSLQPEDFATYYCQQSSYSLITFGQGTKVEIKGGGGSGGGGSEPKSSDKTHTCPPCPAPELLGGPSVFLFPPKPKDTLMISRTPEVTCVVVAVSHEDPEVKFNWYVDGVEVHNAKTKPREEQYGSTYRVVSVLTVLHQDWLNGKEYKCKVSNKALPAPIEKTISKAKGQPREPQVYTLPPIRELMTSNQVSLSCAVKGFYPSDIAVEWESNGQPENNYKTTPPVLDSDGSFFLVSKLTVDKSRWQQGNVFSCSVMHEALHNHYTQKSLSLSPGKGGGSGGGSGGGSGGGSGSTGEVQLVESGGGLVQPGGSLRLSCAASGFTLSSYSMHWVRQAPGKGLEWVAYISSYYGYTYYADSVKGRFTISADTSKNTAYLQMNSLRAEDTAVYYCARPAPGHWGFDYWGQGTLVTVSSASTKGPSVFPLAPSSKSTSGGTAALGCLVKDYFPEPVTVSWNSGALTSGVHTFPAVLQSSGLYSLSSVVTVPSSSLGTQTYICNVNHKPSNTKVDKKVEPKSCDKTHT

SEQ ID NO: 902 - protein, 229 aa, Artificial Sequence
  Description of Artificial Sequence: Synthetic polypeptide
MNLLLILTFVAAAVADIQMTQSPSSLSASVGDRVTITCRASQSVSSAVAWYQQKPGKAPKLLIYSASSLYSGVPSRFSGSRSGTDFTLTISSLQPEDFATYYCQQWYYAPITFGQGTKVEIKRTVAAPSVFIFPPSDEQLKSGTASVVCLLNNFYPREAKVQWKVDNALQSGNSQESVTEQDSKDSTYSLSSTLTLSKADYEKHKVYACEVTHQGLSSPVTKSFNRGEC

SEQ ID NO: 903 - protein, 734 aa, Artificial Sequence
  Description of Artificial Sequence: Synthetic polypeptide
MNLLLILTFVAAAVAEVQLVESGGGLVQPGGSLRLSCAASGFDFTAYAMHWVRQAPGKGLEWVASIYPSGGYTAYADSVKGRFTISADTSKNTAYLQMNSLRAEDTAVYYCARRSYYFALDYWGQGTLVTVSSGGGGSDIQMTQSPSSLSASVGDRVTITCRASQSVSSAVAWYQQKPGKAPKLLIYSASSLYSGVPSRFSGSRSGTDFTLTISSLQPEDFATYYCQQASYAPITFGQGTKVEIKGGGGSGGGGSEPKTSDKTHTCPPCPAPELLGGPSVFLFPPKPKDTLMISRTPEVTCVVVAVSHEDPEVKFNWYVDGVEVHNAKTKPREEQYGSTYRVVSVLTVLHQDWLNGKEYKCKVSNKALPAPIEKTISKAKGQPREPMVFDLPPSREEMTKNQVSLWCMVKGFYPSDIAVEWESNGQPENNYKTTPPVLDSDGSFFLYSKLTVDKSRWQQGNVFSCSVMHEALHNHYTQKSLSLSPGKGGGSGGGSGGGSGGGSGSTGEVQLVESGGGLVQPGGSLRLSCAASGFTLSSYSMHWVRQAPGKGLEWVAYISSYYGYTYYADSVKGRFTISADTSKNTAYLQMNSLRAEDTAVYYCARPAPGHWGFDYWGQGTLVTVSSASTKGPSVFPLAPSSKSTSGGTAALGCLVKDYFPEPVTVSWNSGALTSGVHTFPAVLQSSGLYSLSSVVTVPSSSLGTQTYICNVNHKPSNTKVDKKVEPKSCDKTHT

SEQ ID NO: 904 - protein, 739 aa, Artificial Sequence
  Description of Artificial Sequence: Synthetic polypeptide
MNLLLILTFVAAAVAEVQLVESGGGLVQPGGSLRLSCAASGFNLSYYYMHWVRQAPGKGLEWVASIYSSYGYTYYADSVKGRFTISADTSKNTAYLQMNSLRAEDTAVYYCARWSHVSGHYSGMDYWGQGTLVTVSSGGGGSDIQMTQSPSSLSASVGDRVTITCRASQSVSSAVAWYQQKPGKAPKLLIYSASDLYSGVPSRFSGSRSGTDFTLTISSLQPEDFATYYCQQYAGAGLITFGQGTKVEIKGGGGSGGGGSEPKSSDKTHTCPPCPAPELLGGPSVFLFPPKPKDTLMISRTPEVTCVVVAVSHEDPEVKFNWYVDGVEVHNAKTKPREEQYGSTYRVVSVLTVLHQDWLNGKEYKCKVSNKALPAPIEKTISKAKGQPREPQVYTLPPIRELMTSNQVSLSCAVKGFYPSDIAVEWESNGQPENNYKTTPPVLDSDGSFFLVSKLTVDKSRWQQGNVFSCSVMHEALHNHYTQKSLSLSPGKGGGSGGGSGGGSGGGSGSTGEVQLVESGGGLVQPGGSLRLSCAASGFTLSSYSMHWVRQAPGKGLEWVAYISSYYGYTYYADSVKGRFTISADTSKNTAYLQMNSLRAEDTAVYYCARPAPGHWGFDYWGQGTLVTVSSASTKGPSVFPLAPSSKSTSGGTAALGCLVKDYFPEPVTVSWNSGALTSGVHTFPAVLQSSGLYSLSSVVTVPSSSLGTQTYICNVNHKPSNTKVDKKVEPKSCDKTHT

SEQ ID NO: 905 - protein, 747 aa, Artificial Sequence
  Description of Artificial Sequence: Synthetic polypeptide
MNLLLILTFVAAAVAEVQLVESGGGLVQPGGSLRLSCAASGFNFSSSSIHWVRQAPGKGLEWVASISSSYGYTYYADSVKGRFTISADTSKNTAYLQMNSLRAEDTAVYYCARGGSGVSHYGSVYYSWWALDYWGQGTLVTVSSGGGGSDIQMTQSPSSLSASVGDRVTITCRASQSVSSAVAWYQQKPGKAPKLLIYSASSLYSGVPSRFSGSRSGTDFTLTISSLQPEDFATYYCQQYWAYYSPITFGQGTKVEIKGGGGSGGGGSEPKTSDKTHTCPPCPAPELLGGPSVFLFPPKPKDTLMISRTPEVTCVVVAVSHEDPEVKFNWYVDGVEVHNAKTKPREEQYGSTYRVVSVLTVLHQDWLNGKEYKCKVSNKALPAPIEKTISKAKGQPREPMVFDLPPSREEMTKNQVSLWCMVKGFYPSDIAVEWESNGQPENNYKTTPPVLDSDGSFFLYSKLTVDKSRWQQGNVFSCSVMHEALHNHYTQKSLSLSPGKGGGSGGGSGGGSGGGSGSTGEVQLVESGGGLVQPGGSLRLSCAASGFTLSSYSMHWVRQAPGKGLEWVAYISSYYGYTYYADSVKGRFTISADTSKNTAYLQMNSLRAEDTAVYYCARPAPGHWGFDYWGQGTLVTVSSASTKGPSVFPLAPSSKSTSGGTAALGCLVKDYFPEPVTVSWNSGALTSGVHTFPAVLQSSGLYSLSSVVTVPSSSLGTQTYICNVNHKPSNTKVDKKVEPKSCDKTHT

SEQ ID NO: 906 - protein, 731 aa, Artificial Sequence
  Description of Artificial Sequence: Synthetic polypeptide
MNLLLILTFVAAAVAEVQLVESGGGLVQPGGSLRLSCAASGFNFSSSSIHWVRQAPGKGLEWVASISSSYGYTYYADSVKGRFTISADTSKNTAYLQMNSLRAEDTAVYYCARSWAMDYWGQGTLVTVSSGGGGSDIQMTQSPSSLSASVGDRVTITCRASQSVSSAVAWYQQKPGKAPKLLIYSASSLYSGVPSRFSGSRSGTDFTLTISSLQPEDFATYYCQQSSYSLITFGQGTKVEIKGGGGSGGGGSEPKSSDKTHTCPPCPAPELLGGPSVFLFPPKPKDTLMISRTPEVTCVVVAVSHEDPEVKFNWYVDGVEVHNAKTKPREEQYGSTYRVVSVLTVLHQDWLNGKEYKCKVSNKALPAPIEKTISKAKGQPREPQVYTLPPIRELMTSNQVSLSCAVKGFYPSDIAVEWESNGQPENNYKTTPPVLDSDGSFFLVSKLTVDKSRWQQGNVFSCSVMHEALHNHYTQKSLSLSPGKGGGSGGGSGGGSGGGSGSTGEVQLVESGGGLVQPGGSLRLSCAASGFTLSSYSMHWVRQAPGKGLEWVAYISSYYGYTYYADSVKGRFTISADTSKNTAYLQMNSLRAEDTAVYYCARPAPGHWGFDYWGQGTLVTVSSASTKGPSVFPLAPSSKSTSGGTAALGCLVKDYFPEPVTVSWNSGALTSGVHTFPAVLQSSGLYSLSSVVTVPSSSLGTQTYICNVNHKPSNTKVDKKVEPKSCDKTHT

SEQ ID NO: 907 - protein, 736 aa, Artificial Sequence
  Description of Artificial Sequence: Synthetic polypeptide
MNLLLILTFVAAAVAEVQLVESGGGLVQPGGSLRLSCAASGFDFTAYAMHWVRQAPGKGLEWVASIYPSGGYTAYADSVKGRFTISADTSKNTAYLQMNSLRAEDTAVYYCARRSYYFALDYWGQGTLVTVSSGGGGSDIQMTQSPSSLSASVGDRVTITCRASQSVSSAVAWYQQKPGKAPKLLIYSASSLYSGVPSRFSGSRSGTDFTLTISSLQPEDFATYYCQQYWAYYSPITFGQGTKVEIKGGGGSGGGGSEPKTSDKTHTCPPCPAPELLGGPSVFLFPPKPKDTLMISRTPEVTCVVVAVSHEDPEVKFNWYVDGVEVHNAKTKPREEQYGSTYRVVSVLTVLHQDWLNGKEYKCKVSNKALPAPIEKTISKAKGQPREPMVFDLPPSREEMTKNQVSLWCMVKGFYPSDIAVEWESNGQPENNYKTTPPVLDSDGSFFLYSKLTVDKSRWQQGNVFSCSVMHEALHNHYTQKSLSLSPGKGGGSGGGSGGGSGGGSGSTGEVQLVESGGGLVQPGGSLRLSCAASGFTLSSYSMHWVRQAPGKGLEWVAYISSYDSITDYADSVKGRFTISADTSKNTAYLQMNSLRAEDTAVYYCARPAVGHMAFDYWGQGTLVTVSSASTKGPSVFPLAPSSKSTSGGTAALGCLVKDYFPEPVTVSWNSGALTSGVHTFPAVLQSSGLYSLSSVVTVPSSSLGTQTYICNVNHKPSNTKVDKKVEPKSCDKTHT

SEQ ID NO: 908 - protein, 732 aa, Artificial Sequence
  Description of Artificial Sequence: Synthetic polypeptide
MNLLLILTFVAAAVAEVQLVESGGGLVQPGGSLRLSCAASGFDFSSSSIHWVRQAPGKGLEWVASISSSYGYTYYADSVKGRFTISADTSKNTAYLQMNSLRAEDTAVYYCARSWAMDYWGQGTLVTVSSGGGGSDIQMTQSPSSLSASVGDRVTITCRASQSVSSAVAWYQQKPGKAPKLLIYSASDLYSGVPSRFSGSRSGTDFTLTISSLQPEDFATYYCQQYAGAGLITFGQGTKVEIKGGGGSGGGGSEPKSSDKTHTCPPCPAPELLGGPSVFLFPPKPKDTLMISRTPEVTCVVVAVSHEDPEVKFNWYVDGVEVHNAKTKPREEQYGSTYRVVSVLTVLHQDWLNGKEYKCKVSNKALPAPIEKTISKAKGQPREPQVYTLPPIRELMTSNQVSLSCAVKGFYPSDIAVEWESNGQPENNYKTTPPVLDSDGSFFLVSKLTVDKSRWQQGNVFSCSVMHEALHNHYTQKSLSLSPGKGGGSGGGSGGGSGGGSGSTGEVQLVESGGGLVQPGGSLRLSCAASGFTLSSYSMHWVRQAPGKGLEWVAYISSYDSITDYADSVKGRFTISADTSKNTAYLQMNSLRAEDTAVYYCARPAVGHMAFDYWGQGTLVTVSSASTKGPSVFPLAPSSKSTSGGTAALGCLVKDYFPEPVTVSWNSGALTSGVHTFPAVLQSSGLYSLSSVVTVPSSSLGTQTYICNVNHKPSNTKVDKKVEPKSCDKTHT

SEQ ID NO: 909 - protein, 229 aa, Artificial Sequence
  Description of Artificial Sequence: Synthetic polypeptide
MNLLLILTFVAAAVADIQMTQSPSSLSASVGDRVTITCRASQSVSSAVAWYQQKPGKAPKLLIYSASSLYSGVPSRFSGSRSGTDFTLTISSLQPEDFATYYCQQWYNAPITFGQGTKVEIKRTVAAPSVFIFPPSDEQLKSGTASVVCLLNNFYPREAKVQWKVDNALQSGNSQESVTEQDSKDSTYSLSSTLTLSKADYEKHKVYACEVTHQGLSSPVTKSFNRGEC

SEQ ID NO: 910 - protein, 737 aa, Artificial Sequence
  Description of Artificial Sequence: Synthetic polypeptide
MNLLLILTFVAAAVAEVQLVESGGGLVQPGGSLRLSCAASGFDFTAYAMHWVRQAPGKGLEWVASIYPSGGYTAYADSVKGRFTISADTSKNTAYLQMNSLRAEDTAVYYCARRSYYFALDYWGQGTLVTVSSGGGGSDIQMTQSPSSLSASVGDRVTITCRASQSVSSAVAWYQQKPGKAPKLLIYSASSLYSGVPSRFSGSRSGTDFTLTISSLQPEDFATYYCQQYWAYYSPITFGQGTKVEIKGGGGSGGGGSEPKTSDKTHTCPPCPAPELLGGPSVFLFPPKPKDTLMISRTPEVTCVVVAVSHEDPEVKFNWYVDGVEVHNAKTKPREEQYGSTYRVVSVLTVLHQDWLNGKEYKCKVSNKALPAPIEKTISKAKGQPREPMVFDLPPSREEMTKNQVSLWCMVKGFYPSDIAVEWESNGQPENNYKTTPPVLDSDGSFFLYSKLTVDKSRWQQGNVFSCSVMHEALHNHYTQKSLSLSPGKGGGSGGGSGGGSGGGSGSTGEVQLVESGGGLVQPGGSLRLSCAASGFTSDFYFIHWVRQAPGKGLEWVATIYPFIGNTYYADSVKGRFTISADTSKNTAYLQMNSLRAEDTAVYYCARAFPGSYHPFDYWGQGTLVTVSSASTKGPSVFPLAPSSKSTSGGTAALGCLVKDYFPEPVTVSWNSGALTSGVHTFPAVLQSSGLYSLSSVVTVPSSSLGTQTYICNVNHKPSNTKVDKKVEPKSCDKTHT

SEQ ID NO: 911 - protein, 733 aa, Artificial Sequence
  Description of Artificial Sequence: Synthetic polypeptide
MNLLLILTFVAAAVAEVQLVESGGGLVQPGGSLRLSCAASGFDFSSSSIHWVRQAPGKGLEWVASISSSYGYTYYADSVKGRFTISADTSKNTAYLQMNSLRAEDTAVYYCARSWAMDYWGQGTLVTVSSGGGGSDIQMTQSPSSLSASVGDRVTITCRASQSVSSAVAWYQQKPGKAPKLLIYSASDLYSGVPSRFSGSRSGTDFTLTISSLQPEDFATYYCQQYAGAGLITFGQGTKVEIKGGGGSGGGGSEPKSSDKTHTCPPCPAPELLGGPSVFLFPPKPKDTLMISRTPEVTCVVVAVSHEDPEVKFNWYVDGVEVHNAKTKPREEQYGSTYRVVSVLTVLHQDWLNGKEYKCKVSNKALPAPIEKTISKAKGQPREPQVYTLPPIRELMTSNQVSLSCAVKGFYPSDIAVEWESNGQPENNYKTTPPVLDSDGSFFLVSKLTVDKSRWQQGNVFSCSVMHEALHNHYTQKSLSLSPGKGGGSGGGSGGGSGGGSGSTGEVQLVESGGGLVQPGGSLRLSCAASGFTSDFYFIHWVRQAPGKGLEWVATIYPFIGNTYYADSVKGRFTISADTSKNTAYLQMNSLRAEDTAVYYCARAFPGSYHPFDYWGQGTLVTVSSASTKGPSVFPLAPSSKSTSGGTAALGCLVKDYFPEPVTVSWNSGALTSGVHTFPAVLQSSGLYSLSSVVTVPSSSLGTQTYICNVNHKPSNTKVDKKVEPKSCDKTHT

SEQ ID NO: 912 - protein, 229 aa, Artificial Sequence
  Description of Artificial Sequence: Synthetic polypeptide
MNLLLILTFVAAAVADIQMTQSPSSLSASVGDRVTITCRASQSVSSAVAWYQQKPGKAPKLLIYSASSLYSGVPSRFSGSRSGTDFTLTISSLQPEDFATYYCQQSTGSLITFGQGTKVEIKRTVAAPSVFIFPPSDEQLKSGTASVVCLLNNFYPREAKVQWKVDNALQSGNSQESVTEQDSKDSTYSLSSTLTLSKADYEKHKVYACEVTHQGLSSPVTKSFNRGEC

SEQ ID NO: 913 - protein, 717 aa, Artificial Sequence
  Description of Artificial Sequence: Synthetic polypeptide
EVQLVESGGGLVQPGGSLRLSCAASGFDLSHSSIHWVRQAPGKGLEWVASISSHYGYTHYADSVKGRFTISADTSKNTAYLQMNSLRAEDTAVYYCARSSYFPWFFALDYWGQGTLVTVSSGGGGSDIQMTQSPSSLSASVGDRVTITCRASQSVSSAVAWYQQKPGKAPKLLIYSASSLYSGVPSRFSGSRSGTDFTLTISSLQPEDFATYYCQQYYWPITFGQGTKVEIKGGGGSGGGGSEPKTSDKTHTCPPCPAPELLGGPSVFLFPPKPKDTLMISRTPEVTCVVVAVSHEDPEVKFNWYVDGVEVHNAKTKPREEQYGSTYRVVSVLTVLHQDWLNGKEYKCKVSNKALPAPIEKTISKAKGQPREPMVFDLPPSREEMTKNQVSLWCMVKGFYPSDIAVEWESNGQPENNYKTTPPVLDSDGSFFLYSKLTVDKSRWQQGNVFSCSVMHEALHNHYTQKSLSLSPGKGGGSGGGSGGGSGGGSGSTGEVQLVESGGGLVQPGGSLRLSCAASGFNIAYSSMHWVRQAPGKGLEWVATIYPSYSSTYYADSVKGRFTISADTSKNTAYLQMNSLRAEDTAVYYCARYYAMDYWGQGTLVTVSSASTKGPSVFPLAPSSKSTSGGTAALGCLVKDYFPEPVTVSWNSGALTSGVHTFPAVLQSSGLYSLSSVVTVPSSSLGTQTYICNVNHKPSNTKVDKKVEPKSCDKTHT

SEQ ID NO: 914 - protein, 722 aa, Artificial Sequence
  Description of Artificial Sequence: Synthetic polypeptide
EVQLVESGGGLVQPGGSLRLSCAASGFDISSYFIHWVRQAPGKGLEWVASIYPSYSYTSYADSVKGRFTISADTSKNTAYLQMNSLRAEDTAVYYCARNVRGFRKPYFSRWAMDYWGQGTLVTVSSGGGGSDIQMTQSPSSLSASVGDRVTITCRASQSVSSAVAWYQQKPGKAPKLLIYSASSLYSGVPSRFSGSRSGTDFTLTISSLQPEDFATYYCQQYFFPITFGQGTKVEIKGGGGSGGGGSEPKSSDKTHTCPPCPAPELLGGPSVFLFPPKPKDTLMISRTPEVTCVVVAVSHEDPEVKFNWYVDGVEVHNAKTKPREEQYGSTYRVVSVLTVLHQDWLNGKEYKCKVSNKALPAPIEKTISKAKGQPREPQVYTLPPIRELMTSNQVSLSCAVKGFYPSDIAVEWESNGQPENNYKTTPPVLDSDGSFFLVSKLTVDKSRWQQGNVFSCSVMHEALHNHYTQKSLSLSPGKGGGSGGGSGGGSGGGSGSTGEVQLVESGGGLVQPGGSLRLSCAASGFNIAYSSMHWVRQAPGKGLEWVATIYPSYSSTYYADSVKGRFTISADTSKNTAYLQMNSLRAEDTAVYYCARYYAMDYWGQGTLVTVSSASTKGPSVFPLAPSSKSTSGGTAALGCLVKDYFPEPVTVSWNSGALTSGVHTFPAVLQSSGLYSLSSVVTVPSSSLGTQTYICNVNHKPSNTKVDKKVEPKSCDKTHT

SEQ ID NO: 915 - protein, 214 aa, Artificial Sequence
  Description of Artificial Sequence: Synthetic polypeptide
DIQMTQSPSSLSASVGDRVTITCRASQSVSSAVAWYQQKPGKAPKLLIYSASSLYSGVPSRFSGSRSGTDFTLTISSLQPEDFATYYCQQAHYFPITFGQGTKVEIKRTVAAPSVFIFPPSDEQLKSGTASVVCLLNNFYPREAKVQWKVDNALQSGNSQESVTEQDSKDSTYSLSSTLTLSKADYEKHKVYACEVTHQGLSSPVTKSFNRGEC

SEQ ID NO: 916 - protein, 722 aa, Artificial Sequence
  Description of Artificial Sequence: Synthetic polypeptide
EVQLVESGGGLVQPGGSLRLSCAASGFDLSHSSIHWVRQAPGKGLEWVASISSHYGYTHYADSVKGRFTISADTSKNTAYLQMNSLRAEDTAVYYCARSSYFPWFFALDYWGQGTLVTVSSGGGGSDIQMTQSPSSLSASVGDRVTITCRASQSVSSAVAWYQQKPGKAPKLLIYSASSLYSGVPSRFSGSRSGTDFTLTISSLQPEDFATYYCQQYYWPITFGQGTKVEIKGGGGSGGGGSEPKTSDKTHTCPPCPAPELLGGPSVFLFPPKPKDTLMISRTPEVTCVVVAVSHEDPEVKFNWYVDGVEVHNAKTKPREEQYGSTYRVVSVLTVLHQDWLNGKEYKCKVSNKALPAPIEKTISKAKGQPREPMVFDLPPSREEMTKNQVSLWCMVKGFYPSDIAVEWESNGQPENNYKTTPPVLDSDGSFFLYSKLTVDKSRWQQGNVFSCSVMHEALHNHYTQKSLSLSPGKGGGSGGGSGGGSGGGSGSTGEVQLVESGGGLVQPGGSLRLSCAASGFNIHSSSIHWVRQAPGKGLEWVAATYSSFGSITYADSVKGRFTISADTSKNTAYLQMNSLRAEDTAVYYCARYHHPFGYALDYWGQGTLVTVSSASTKGPSVFPLAPSSKSTSGGTAALGCLVKDYFPEPVTVSWNSGALTSGVHTFPAVLQSSGLYSLSSVVTVPSSSLGTQTYICNVNHKPSNTKVDKKVEPKSCDKTHT

SEQ ID NO: 917 - protein, 727 aa, Artificial Sequence
  Description of Artificial Sequence: Synthetic polypeptide
EVQLVESGGGLVQPGGSLRLSCAASGFDISSYFIHWVRQAPGKGLEWVASIYPSYSYTSYADSVKGRFTISADTSKNTAYLQMNSLRAEDTAVYYCARNVRGFRKPYFSRWAMDYWGQGTLVTVSSGGGGSDIQMTQSPSSLSASVGDRVTITCRASQSVSSAVAWYQQKPGKAPKLLIYSASSLYSGVPSRFSGSRSGTDFTLTISSLQPEDFATYYCQQYFFPITFGQGTKVEIKGGGGSGGGGSEPKSSDKTHTCPPCPAPELLGGPSVFLFPPKPKDTLMISRTPEVTCVVVAVSHEDPEVKFNWYVDGVEVHNAKTKPREEQYGSTYRVVSVLTVLHQDWLNGKEYKCKVSNKALPAPIEKTISKAKGQPREPQVYTLPPIRELMTSNQVSLSCAVKGFYPSDIAVEWESNGQPENNYKTTPPVLDSDGSFFLVSKLTVDKSRWQQGNVFSCSVMHEALHNHYTQKSLSLSPGKGGGSGGGSGGGSGGGSGSTGEVQLVESGGGLVQPGGSLRLSCAASGFNIHSSSIHWVRQAPGKGLEWVAATYSSFGSITYADSVKGRFTISADTSKNTAYLQMNSLRAEDTAVYYCARYHHPFGYALDYWGQGTLVTVSSASTKGPSVFPLAPSSKSTSGGTAALGCLVKDYFPEPVTVSWNSGALTSGVHTFPAVLQSSGLYSLSSVVTVPSSSLGTQTYICNVNHKPSNTKVDKKVEPKSCDKTHT

SEQ ID NO: 918 - protein, 213 aa, Artificial Sequence
  Description of Artificial Sequence: Synthetic polypeptide
DIQMTQSPSSLSASVGDRVTITCRASQSVSSAVAWYQQKPGKAPKLLIYSASSLYSGVPSRFSGSRSGTDFTLTISSLQPEDFATYYCQQGVYLFTFGQGTKVEIKRTVAAPSVFIFPPSDEQLKSGTASVVCLLNNFYPREAKVQWKVDNALQSGNSQESVTEQDSKDSTYSLSSTLTLSKADYEKHKVYACEVTHQGLSSPVTKSFNRGEC

SEQ ID NO: 919 - protein, 735 aa, Artificial Sequence
  Description of Artificial Sequence: Synthetic polypeptide
EFEVQLVESGGGLVQPGGSLRLSCAASGFNSSFYFMHWVRQAPGKGLEWVATVYPYLDYTYYADSVKGRFTISADTSKNTAYLQMNSLRAEDTAVYYCARAFPGSYHPMDYWGQGTLVTVSSGGGGSDIQMTQSPSSLSASVGDRVTITCRASQSVSSAVAWYQQKPGKAPKLLIYSASSLYSGVPSRFSGSRSGTDFTLTISSLQPEDFATYYCQQSSYSLITFGQGTKVEIKLEDKTHTKVEPKTSDKTHTCPPCPAPELLGGPSVFLFPPKPKDTLMISRTPEVTCVVVDVSHEDPEVKFNWYVDGVEVHNAKTKPREEQYNSTYRVVSVLTVLHQDWLNGKEYKCKVSNKALPAPIEKTISKAKGQPREPMVFDLPPSREEMTKNQVSLWCMVKGFYPSDIAVEWESNGQPENNYKTTPPVLDSDGSFFLYSKLTVDKSRWQQGNVFSCSVMHEALHNHYTQKSLSLSPGKSGSETPGTSESATPESGGGEVQLVESGGGLVQPGGSLRLSCAASGFNFSSSSIHWVRQAPGKGLEWVASISSSYGYTYYADSVKGRFTISADTSKNTAYLQMNSLRAEDTAVYYCARGGSGVSHYGSVYYSWWALDYWGQGTLVTVSSGGGGSDIQMTQSPSSLSASVGDRVTITCRASQSVSSAVAWYQQKPGKAPKLLIYSASSLYSGVPSRFSGSRSGTDFTLTISSLQPEDFATYYCQQASYAPITFGQGTKVEIK

SEQ ID NO: 920 - protein, 728 aa, Artificial Sequence
  Description of Artificial Sequence: Synthetic polypeptide
EFEVQLVESGGGLVQPGGSLRLSCAASGFNSSFYFMHWVRQAPGKGLEWVATVYPYLDYTYYADSVKGRFTISADTSKNTAYLQMNSLRAEDTAVYYCARAFPGSYHPMDYWGQGTLVTVSSGGGGSDIQMTQSPSSLSASVGDRVTITCRASQSVSSAVAWYQQKPGKAPKLLIYSASSLYSGVPSRFSGSRSGTDFTLTISSLQPEDFATYYCQQSSYSLITFGQGTKVEIKLEDKTHTKVEPKSSDKTHNCPPCPAPELLGGPSVFLFPPKPKDTLMISRTPEVTCVVVDVSHEDPEVKFNWYVDGVEVHNAKTKPREEQYNSTYRVVSVLTVLHQDWLNGKEYKCKVSNKALPAPIEKTISKAKGQPREPQVYTLPPIRELMTSNQVSLSCAVKGFYPSDIAVEWESNGQPENNYKTTPPVLDSDGSFFLVSKLTVDKSRWQQGNVFSCSVMHEALHNHYTQKSLSLSPGKSGSETPGTSESATPESGGGEVQLVESGGGLVQPGGSLRLSCAASGFNLSYYYMHWVRQAPGKGLEWVASIYSSYGYTYYADSVKGRFTISADTSKNTAYLQMNSLRAEDTAVYYCARWSHVSGHYSGMDYWGQGTLVTVSSGGGGSDIQMTQSPSSLSASVGDRVTITCRASQSVSSAVAWYQQKPGKAPKLLIYSASSLYSGVPSRFSGSRSGTDFTLTISSLQPEDFATYYCQQSSYSLITFGQGTKVEIK

SEQ ID NO: 921 - protein, 712 aa, Artificial Sequence
  Description of Artificial Sequence: Synthetic polypeptide
MNLLLILTFVAAAVAEVQLVESGGGLVQPGGSLRLSCAASGFTLSSYSMHWVRQAPGKGLEWVAYISSYDSITDYADSVKGRFTISADTSKNTAYLQMNSLRAEDTAVYYCARPAVGHMAFDYWGQGTLVTVSSASTKGPSVFPLAPSSKSTSGGTAALGCLVKDYFPEPVTVSWNSGALTSGVHTFPAVLQSSGLYSLSSVVTVPSSSLGTQTYICNVNHKPSNTKVDKKVEPKSCDKTHTCPPCPAPELLGGPSVFLFPPKPKDTLMISRTPEVTCVVVAVSHEDPEVKFNWYVDGVEVHNAKTKPREEQYGSTYRVVSVLTVLHQDWLNGKEYKCKVSNKALPAPIEKTISKAKGQPREPQVYTLPPIRELMTSNQVSLSCAVKGFYPSDIAVEWESNGQPENNYKTTPPVLDSDGSFFLVSKLTVDKSRWQQGNVFSCSVMHEALHNHYTQKSLSLSPGKGGGSGGGSGGGSGGGSGSTGEVQLVESGGGLVQPGGSLRLSCAASGFDFSSSSIHWVRQAPGKGLEWVASISSSYGYTYYADSVKGRFTISADTSKNTAYLQMNSLRAEDTAVYYCARSWAMDYWGQGTLVTVSSGGGGSDIQMTQSPSSLSASVGDRVTITCRASQSVSSAVAWYQQKPGKAPKLLIYSASDLYSGVPSRFSGSRSGTDFTLTISSLQPEDFATYYCQQYAGAGLITFGQGTKVEIK

SEQ ID NO: 922 - protein, 712 aa, Artificial Sequence
  Description of Artificial Sequence: Synthetic polypeptide
MNLLLILTFVAAAVAEVQLVESGGGLVQPGGSLRLSCAASGFTLSSYSMHWVRQAPGKGLEWVAYISSYDSITDYADSVKGRFTISADTSKNTAYLQMNSLRAEDTAVYYCARPAVGHMAFDYWGQGTLVTVSSASTKGPSVFPLAPSSKSTSGGTAALGCLVKDYFPEPVTVSWNSGALTSGVHTFPAVLQSSGLYSLSSVVTVPSSSLGTQTYICNVNHKPSNTKVDKKVEPKSCDKTHTCPPCPAPEAAGGPSVFLFPPKPKDTLMISRTPEVTCVVVDVSHEDPEVKFNWYVDGVEVHNAKTKPREEQYNSTYRVVSVLTVLHQDWLNGKEYKCKVSNKALPASIEKTISKAKGQPREPQVYTLPPIRELMTSNQVSLSCAVKGFYPSDIAVEWESNGQPENNYKTTPPVLDSDGSFFLVSKLTVDKSRWQQGNVFSCSVMHEALHNHYTQKSLSLSPGKGGGSGGGSGGGSGGGSGSTGEVQLVESGGGLVQPGGSLRLSCAASGFDFSSSSIHWVRQAPGKGLEWVASISSSYGYTYYADSVKGRFTISADTSKNTAYLQMNSLRAEDTAVYYCARSWAMDYWGQGTLVTVSSGGGGSDIQMTQSPSSLSASVGDRVTITCRASQSVSSAVAWYQQKPGKAPKLLIYSASDLYSGVPSRFSGSRSGTDFTLTISSLQPEDFATYYCQQYAGAGLITFGQGTKVEIK

SEQ ID NO: 923 - protein, 712 aa, Artificial Sequence
  Description of Artificial Sequence: Synthetic polypeptide
MNLLLILTFVAAAVAEVQLVESGGGLVQPGGSLRLSCAASGFTLSSYSMHWVRQAPGKGLEWVAYISSYDSITDYADSVKGRFTISADTSKNTAYLQMNSLRAEDTAVYYCARPAVGHMAFDYWGQGTLVTVSSASTKGPSVFPLAPSSKSTSGGTAALGCLVKDYFPEPVTVSWNSGALTSGVHTFPAVLQSSGLYSLSSVVTVPSSSLGTQTYICNVNHKPSNTKVDKKVEPKSCDKTHTCPPCPAPEAAGGPSVFLFPPKPKDTLMISRTPEVTCVVVDVSHEDPEVKFNWYVDGVEVHNAKTKPREEQYNSTYRVVSVLTVLHQDWLNGKEYKCKVSNKALPASIEKTISKAKGQPREPQVYTLPPSREEMTKNQVSLSCAVKGFYPSDIAVEWESNGQPENNYKTTPPVLDSDGSFFLVSKLTVDKSRWQQGNVFSCSVMHEALHNHYTQKSLSLSPGKGGGSGGGSGGGSGGGSGSTGEVQLVESGGGLVQPGGSLRLSCAASGFDFSSSSIHWVRQAPGKGLEWVASISSSYGYTYYADSVKGRFTISADTSKNTAYLQMNSLRAEDTAVYYCARSWAMDYWGQGTLVTVSSGGGGSDIQMTQSPSSLSASVGDRVTITCRASQSVSSAVAWYQQKPGKAPKLLIYSASDLYSGVPSRFSGSRSGTDFTLTISSLQPEDFATYYCQQYAGAGLITFGQGTKVEIK

SEQ ID NO: 924 - protein, 712 aa, Artificial Sequence
  Description of Artificial Sequence: Synthetic polypeptide
MNLLLILTFVAAAVAEVQLVESGGGLVQPGGSLRLSCAASGFTLSSYSMHWVRQAPGKGLEWVAYISSYDSITDYADSVKGRFTISADTSKNTAYLQMNSLRAEDTAVYYCARPAVGHMAFDYWGQGTLVTVSSASTKGPSVFPLAPSSKSTSGGTAALGCLVKDYFPEPVTVSWNSGALTSGVHTFPAVLQSSGLYSLSSVVTVPSSSLGTQTYICNVNHKPSNTKVDKKVEPKSCDKTHTCPPCPAPEAAGGPSVFLFPPKPKDTLMISRTPEVTCVVVDVSHEDPEVKFNWYVDGVEVHNAKTKPREEQYNSTYRVVSVLTVLHQDWLNGKEYKCKVSNKALPASIEKTISKAKGQPREPQVCTLPPSREEMTKNQVSLSCAVKGFYPSDIAVEWESNGQPENNYKTTPPVLDSDGSFFLVSKLTVDKSRWQQGNVFSCSVMHEALHNHYTQKSLSLSPGKGGGSGGGSGGGSGGGSGSTGEVQLVESGGGLVQPGGSLRLSCAASGFDFSSSSIHWVRQAPGKGLEWVASISSSYGYTYYADSVKGRFTISADTSKNTAYLQMNSLRAEDTAVYYCARSWAMDYWGQGTLVTVSSGGGGSDIQMTQSPSSLSASVGDRVTITCRASQSVSSAVAWYQQKPGKAPKLLIYSASDLYSGVPSRFSGSRSGTDFTLTISSLQPEDFATYYCQQYAGAGLITFGQGTKVEIK

SEQ ID NO: 925 - protein, 697 aa, Artificial Sequence
  Description of Artificial Sequence: Synthetic polypeptide
EVQLVESGGGLVQPGGSLRLSCAASGFTLSSYSMHWVRQAPGKGLEWVAYISSYDSITDYADSVKGRFTISADTSKNTAYLQMNSLRAEDTAVYYCARPAVGHMAFDYWGQGTLVTVSSASTKGPSVFPLAPSSKSTSGGTAALGCLVKDYFPEPVTVSWNSGALTSGVHTFPAVLQSSGLYSLSSVVTVPSSSLGTQTYICNVNHKPSNTKVDKKVEPKSCDKTHTCPPCPAPELLGGPSVFLFPPKPKDTLMISRTPEVTCVVVAVSHEDPEVKFNWYVDGVEVHNAKTKPREEQYGSTYRVVSVLTVLHQDWLNGKEYKCKVSNKALPAPIEKTISKAKGQPREPQVYTLPPIRELMTSNQVSLSCAVKGFYPSDIAVEWESNGQPENNYKTTPPVLDSDGSFFLVSKLTVDKSRWQQGNVFSCSVMHEALHNHYTQKSLSLSPGKGGGSGGGSGGGSGGGSGSTGEVQLVESGGGLVQPGGSLRLSCAASGFDFSSSSIHWVRQAPGKGLEWVASISSSYGYTYYADSVKGRFTISADTSKNTAYLQMNSLRAEDTAVYYCARSWAMDYWGQGTLVTVSSGGGGSDIQMTQSPSSLSASVGDRVTITCRASQSVSSAVAWYQQKPGKAPKLLIYSASDLYSGVPSRFSGSRSGTDFTLTISSLQPEDFATYYCQQYAGAGLITFGQGTKVEIK

SEQ ID NO: 926 - protein, 697 aa, Artificial Sequence
  Description of Artificial Sequence: Synthetic polypeptide
EVQLVESGGGLVQPGGSLRLSCAASGFTLSSYSMHWVRQAPGKGLEWVAYISSYDSITDYADSVKGRFTISADTSKNTAYLQMNSLRAEDTAVYYCARPAVGHMAFDYWGQGTLVTVSSASTKGPSVFPLAPSSKSTSGGTAALGCLVKDYFPEPVTVSWNSGALTSGVHTFPAVLQSSGLYSLSSVVTVPSSSLGTQTYICNVNHKPSNTKVDKKVEPKSCDKTHTCPPCPAPEAAGGPSVFLFPPKPKDTLMISRTPEVTCVVVDVSHEDPEVKFNWYVDGVEVHNAKTKPREEQYNSTYRVVSVLTVLHQDWLNGKEYKCKVSNKALPASIEKTISKAKGQPREPQVYTLPPIRELMTSNQVSLSCAVKGFYPSDIAVEWESNGQPENNYKTTPPVLDSDGSFFLVSKLTVDKSRWQQGNVFSCSVMHEALHNHYTQKSLSLSPGKGGGSGGGSGGGSGGGSGSTGEVQLVESGGGLVQPGGSLRLSCAASGFDFSSSSIHWVRQAPGKGLEWVASISSSYGYTYYADSVKGRFTISADTSKNTAYLQMNSLRAEDTAVYYCARSWAMDYWGQGTLVTVSSGGGGSDIQMTQSPSSLSASVGDRVTITCRASQSVSSAVAWYQQKPGKAPKLLIYSASDLYSGVPSRFSGSRSGTDFTLTISSLQPEDFATYYCQQYAGAGLITFGQGTKVEIK

SEQ ID NO: 927 - protein, 697 aa, Artificial Sequence
  Description of Artificial Sequence: Synthetic polypeptide
EVQLVESGGGLVQPGGSLRLSCAASGFTLSSYSMHWVRQAPGKGLEWVAYISSYDSITDYADSVKGRFTISADTSKNTAYLQMNSLRAEDTAVYYCARPAVGHMAFDYWGQGTLVTVSSASTKGPSVFPLAPSSKSTSGGTAALGCLVKDYFPEPVTVSWNSGALTSGVHTFPAVLQSSGLYSLSSVVTVPSSSLGTQTYICNVNHKPSNTKVDKKVEPKSCDKTHTCPPCPAPEAAGGPSVFLFPPKPKDTLMISRTPEVTCVVVDVSHEDPEVKFNWYVDGVEVHNAKTKPREEQYNSTYRVVSVLTVLHQDWLNGKEYKCKVSNKALPASIEKTISKAKGQPREPQVYTLPPSREEMTKNQVSLSCAVKGFYPSDIAVEWESNGQPENNYKTTPPVLDSDGSFFLVSKLTVDKSRWQQGNVFSCSVMHEALHNHYTQKSLSLSPGKGGGSGGGSGGGSGGGSGSTGEVQLVESGGGLVQPGGSLRLSCAASGFDFSSSSIHWVRQAPGKGLEWVASISSSYGYTYYADSVKGRFTISADTSKNTAYLQMNSLRAEDTAVYYCARSWAMDYWGQGTLVTVSSGGGGSDIQMTQSPSSLSASVGDRVTITCRASQSVSSAVAWYQQKPGKAPKLLIYSASDLYSGVPSRFSGSRSGTDFTLTISSLQPEDFATYYCQQYAGAGLITFGQGTKVEIK

SEQ ID NO: 928 - protein, 697 aa, Artificial Sequence
  Description of Artificial Sequence: Synthetic polypeptide
EVQLVESGGGLVQPGGSLRLSCAASGFTLSSYSMHWVRQAPGKGLEWVAYISSYDSITDYADSVKGRFTISADTSKNTAYLQMNSLRAEDTAVYYCARPAVGHMAFDYWGQGTLVTVSSASTKGPSVFPLAPSSKSTSGGTAALGCLVKDYFPEPVTVSWNSGALTSGVHTFPAVLQSSGLYSLSSVVTVPSSSLGTQTYICNVNHKPSNTKVDKKVEPKSCDKTHTCPPCPAPEAAGGPSVFLFPPKPKDTLMISRTPEVTCVVVDVSHEDPEVKFNWYVDGVEVHNAKTKPREEQYNSTYRVVSVLTVLHQDWLNGKEYKCKVSNKALPASIEKTISKAKGQPREPQVCTLPPSREEMTKNQVSLSCAVKGFYPSDIAVEWESNGQPENNYKTTPPVLDSDGSFFLVSKLTVDKSRWQQGNVFSCSVMHEALHNHYTQKSLSLSPGKGGGSGGGSGGGSGGGSGSTGEVQLVESGGGLVQPGGSLRLSCAASGFDFSSSSIHWVRQAPGKGLEWVASISSSYGYTYYADSVKGRFTISADTSKNTAYLQMNSLRAEDTAVYYCARSWAMDYWGQGTLVTVSSGGGGSDIQMTQSPSSLSASVGDRVTITCRASQSVSSAVAWYQQKPGKAPKLLIYSASDLYSGVPSRFSGSRSGTDFTLTISSLQPEDFATYYCQQYAGAGLITFGQGTKVEIK

SEQ ID NO: 929 - protein, 716 aa, Artificial Sequence
  Description of Artificial Sequence: Synthetic polypeptide
MNLLLILTFVAAAVAEVQLVESGGGLVQPGGSLRLSCAASGFTLSSYSMHWVRQAPGKGLEWVAYISSYDSITDYADSVKGRFTISADTSKNTAYLQMNSLRAEDTAVYYCARPAVGHMAFDYWGQGTLVTVSSASTKGPSVFPLAPSSKSTSGGTAALGCLVKDYFPEPVTVSWNSGALTSGVHTFPAVLQSSGLYSLSSVVTVPSSSLGTQTYICNVNHKPSNTKVDKKVEPKSCDKTHTCPPCPAPELLGGPSVFLFPPKPKDTLMISRTPEVTCVVVAVSHEDPEVKFNWYVDGVEVHNAKTKPREEQYGSTYRVVSVLTVLHQDWLNGKEYKCKVSNKALPAPIEKTISKAKGQPREPMVFDLPPSREEMTKNQVSLWCMVKGFYPSDIAVEWESNGQPENNYKTTPPVLDSDGSFFLYSKLTVDKSRWQQGNVFSCSVMHEALHNHYTQKSLSLSPGKGGGSGGGSGGGSGGGSGSTGEVQLVESGGGLVQPGGSLRLSCAASGFDFTAYAMHWVRQAPGKGLEWVASIYPSGGYTAYADSVKGRFTISADTSKNTAYLQMNSLRAEDTAVYYCARRSYYFALDYWGQGTLVTVSSGGGGSDIQMTQSPSSLSASVGDRVTITCRASQSVSSAVAWYQQKPGKAPKLLIYSASSLYSGVPSRFSGSRSGTDFTLTISSLQPEDFATYYCQQYWAYYSPITFGQGTKVEIK

SEQ ID NO: 930 - protein, 716 aa, Artificial Sequence
  Description of Artificial Sequence: Synthetic polypeptide
MNLLLILTFVAAAVAEVQLVESGGGLVQPGGSLRLSCAASGFTLSSYSMHWVRQAPGKGLEWVAYISSYDSITDYADSVKGRFTISADTSKNTAYLQMNSLRAEDTAVYYCARPAVGHMAFDYWGQGTLVTVSSASTKGPSVFPLAPSSKSTSGGTAALGCLVKDYFPEPVTVSWNSGALTSGVHTFPAVLQSSGLYSLSSVVTVPSSSLGTQTYICNVNHKPSNTKVDKKVEPKSCDKTHTCPPCPAPEAAGGPSVFLFPPKPKDTLMISRTPEVTCVVVDVSHEDPEVKFNWYVDGVEVHNAKTKPREEQYNSTYRVVSVLTVLHQDWLNGKEYKCKVSNKALPASIEKTISKAKGQPREPMVFDLPPSREEMTKNQVSLWCMVKGFYPSDIAVEWESNGQPENNYKTTPPVLDSDGSFFLYSKLTVDKSRWQQGNVFSCSVMHEALHNHYTQKSLSLSPGKGGGSGGGSGGGSGGGSGSTGEVQLVESGGGLVQPGGSLRLSCAASGFDFTAYAMHWVRQAPGKGLEWVASIYPSGGYTAYADSVKGRFTISADTSKNTAYLQMNSLRAEDTAVYYCARRSYYFALDYWGQGTLVTVSSGGGGSDIQMTQSPSSLSASVGDRVTITCRASQSVSSAVAWYQQKPGKAPKLLIYSASSLYSGVPSRFSGSRSGTDFTLTISSLQPEDFATYYCQQYWAYYSPITFGQGTKVEIK

SEQ ID NO: 931 - protein, 716 aa, Artificial Sequence
  Description of Artificial Sequence: Synthetic polypeptide
MNLLLILTFVAAAVAEVQLVESGGGLVQPGGSLRLSCAASGFTLSSYSMHWVRQAPGKGLEWVAYISSYDSITDYADSVKGRFTISADTSKNTAYLQMNSLRAEDTAVYYCARPAVGHMAFDYWGQGTLVTVSSASTKGPSVFPLAPSSKSTSGGTAALGCLVKDYFPEPVTVSWNSGALTSGVHTFPAVLQSSGLYSLSSVVTVPSSSLGTQTYICNVNHKPSNTKVDKKVEPKSCDKTHTCPPCPAPEAAGGPSVFLFPPKPKDTLMISRTPEVTCVVVDVSHEDPEVKFNWYVDGVEVHNAKTKPREEQYNSTYRVVSVLTVLHQDWLNGKEYKCKVSNKALPASIEKTISKAKGQPREPQVYTLPPSREEMTKNQVSLWCLVKGFYPSDIAVEWESNGQPENNYKTTPPVLDSDGSFFLYSKLTVDKSRWQQGNVFSCSVMHEALHNHYTQKSLSLSPGKGGGSGGGSGGGSGGGSGSTGEVQLVESGGGLVQPGGSLRLSCAASGFDFTAYAMHWVRQAPGKGLEWVASIYPSGGYTAYADSVKGRFTISADTSKNTAYLQMNSLRAEDTAVYYCARRSYYFALDYWGQGTLVTVSSGGGGSDIQMTQSPSSLSASVGDRVTITCRASQSVSSAVAWYQQKPGKAPKLLIYSASSLYSGVPSRFSGSRSGTDFTLTISSLQPEDFATYYCQQYWAYYSPITFGQGTKVEIK

SEQ ID NO: 932 - protein, 716 aa, Artificial Sequence
  Description of Artificial Sequence: Synthetic polypeptide
MNLLLILTFVAAAVAEVQLVESGGGLVQPGGSLRLSCAASGFTLSSYSMHWVRQAPGKGLEWVAYISSYDSITDYADSVKGRFTISADTSKNTAYLQMNSLRAEDTAVYYCARPAVGHMAFDYWGQGTLVTVSSASTKGPSVFPLAPSSKSTSGGTAALGCLVKDYFPEPVTVSWNSGALTSGVHTFPAVLQSSGLYSLSSVVTVPSSSLGTQTYICNVNHKPSNTKVDKKVEPKSCDKTHTCPPCPAPEAAGGPSVFLFPPKPKDTLMISRTPEVTCVVVDVSHEDPEVKFNWYVDGVEVHNAKTKPREEQYNSTYRVVSVLTVLHQDWLNGKEYKCKVSNKALPASIEKTISKAKGQPREPQVYTLPPCREEMTKNQVSLWCLVKGFYPSDIAVEWESNGQPENNYKTTPPVLDSDGSFFLYSKLTVDKSRWQQGNVFSCSVMHEALHNHYTQKSLSLSPGKGGGSGGGSGGGSGGGSGSTGEVQLVESGGGLVQPGGSLRLSCAASGFDFTAYAMHWVRQAPGKGLEWVASIYPSGGYTAYADSVKGRFTISADTSKNTAYLQMNSLRAEDTAVYYCARRSYYFALDYWGQGTLVTVSSGGGGSDIQMTQSPSSLSASVGDRVTITCRASQSVSSAVAWYQQKPGKAPKLLIYSASSLYSGVPSRFSGSRSGTDFTLTISSLQPEDFATYYCQQYWAYYSPITFGQGTKVEIK

SEQ ID NO: 933 - protein, 701 aa, Artificial Sequence
  Description of Artificial Sequence: Synthetic polypeptide
EVQLVESGGGLVQPGGSLRLSCAASGFTLSSYSMHWVRQAPGKGLEWVAYISSYDSITDYADSVKGRFTISADTSKNTAYLQMNSLRAEDTAVYYCARPAVGHMAFDYWGQGTLVTVSSASTKGPSVFPLAPSSKSTSGGTAALGCLVKDYFPEPVTVSWNSGALTSGVHTFPAVLQSSGLYSLSSVVTVPSSSLGTQTYICNVNHKPSNTKVDKKVEPKSCDKTHTCPPCPAPELLGGPSVFLFPPKPKDTLMISRTPEVTCVVVAVSHEDPEVKFNWYVDGVEVHNAKTKPREEQYGSTYRVVSVLTVLHQDWLNGKEYKCKVSNKALPAPIEKTISKAKGQPREPMVFDLPPSREEMTKNQVSLWCMVKGFYPSDIAVEWESNGQPENNYKTTPPVLDSDGSFFLYSKLTVDKSRWQQGNVFSCSVMHEALHNHYTQKSLSLSPGKGGGSGGGSGGGSGGGSGSTGEVQLVESGGGLVQPGGSLRLSCAASGFDFTAYAMHWVRQAPGKGLEWVASIYPSGGYTAYADSVKGRFTISADTSKNTAYLQMNSLRAEDTAVYYCARRSYYFALDYWGQGTLVTVSSGGGGSDIQMTQSPSSLSASVGDRVTITCRASQSVSSAVAWYQQKPGKAPKLLIYSASSLYSGVPSRFSGSRSGTDFTLTISSLQPEDFATYYCQQYWAYYSPITFGQGTKVEIK

SEQ ID NO: 934 - protein, 701 aa, Artificial Sequence
  Description of Artificial Sequence: Synthetic polypeptide
EVQLVESGGGLVQPGGSLRLSCAASGFTLSSYSMHWVRQAPGKGLEWVAYISSYDSITDYADSVKGRFTISADTSKNTAYLQMNSLRAEDTAVYYCARPAVGHMAFDYWGQGTLVTVSSASTKGPSVFPLAPSSKSTSGGTAALGCLVKDYFPEPVTVSWNSGALTSGVHTFPAVLQSSGLYSLSSVVTVPSSSLGTQTYICNVNHKPSNTKVDKKVEPKSCDKTHTCPPCPAPEAAGGPSVFLFPPKPKDTLMISRTPEVTCVVVDVSHEDPEVKFNWYVDGVEVHNAKTKPREEQYNSTYRVVSVLTVLHQDWLNGKEYKCKVSNKALPASIEKTISKAKGQPREPMVFDLPPSREEMTKNQVSLWCMVKGFYPSDIAVEWESNGQPENNYKTTPPVLDSDGSFFLYSKLTVDKSRWQQGNVFSCSVMHEALHNHYTQKSLSLSPGKGGGSGGGSGGGSGGGSGSTGEVQLVESGGGLVQPGGSLRLSCAASGFDFTAYAMHWVRQAPGKGLEWVASIYPSGGYTAYADSVKGRFTISADTSKNTAYLQMNSLRAEDTAVYYCARRSYYFALDYWGQGTLVTVSSGGGGSDIQMTQSPSSLSASVGDRVTITCRASQSVSSAVAWYQQKPGKAPKLLIYSASSLYSGVPSRFSGSRSGTDFTLTISSLQPEDFATYYCQQYWAYYSPITFGQGTKVEIK

SEQ ID NO: 935 - protein, 701 aa, Artificial Sequence
  Description of Artificial Sequence: Synthetic polypeptide
EVQLVESGGGLVQPGGSLRLSCAASGFTLSSYSMHWVRQAPGKGLEWVAYISSYDSITDYADSVKGRFTISADTSKNTAYLQMNSLRAEDTAVYYCARPAVGHMAFDYWGQGTLVTVSSASTKGPSVFPLAPSSKSTSGGTAALGCLVKDYFPEPVTVSWNSGALTSGVHTFPAVLQSSGLYSLSSVVTVPSSSLGTQTYICNVNHKPSNTKVDKKVEPKSCDKTHTCPPCPAPEAAGGPSVFLFPPKPKDTLMISRTPEVTCVVVDVSHEDPEVKFNWYVDGVEVHNAKTKPREEQYNSTYRVVSVLTVLHQDWLNGKEYKCKVSNKALPASIEKTISKAKGQPREPQVYTLPPSREEMTKNQVSLWCLVKGFYPSDIAVEWESNGQPENNYKTTPPVLDSDGSFFLYSKLTVDKSRWQQGNVFSCSVMHEALHNHYTQKSLSLSPGKGGGSGGGSGGGSGGGSGSTGEVQLVESGGGLVQPGGSLRLSCAASGFDFTAYAMHWVRQAPGKGLEWVASIYPSGGYTAYADSVKGRFTISADTSKNTAYLQMNSLRAEDTAVYYCARRSYYFALDYWGQGTLVTVSSGGGGSDIQMTQSPSSLSASVGDRVTITCRASQSVSSAVAWYQQKPGKAPKLLIYSASSLYSGVPSRFSGSRSGTDFTLTISSLQPEDFATYYCQQYWAYYSPITFGQGTKVEIK

SEQ ID NO: 936 - protein, 701 aa, Artificial Sequence
  Description of Artificial Sequence: Synthetic polypeptide
EVQLVESGGGLVQPGGSLRLSCAASGFTLSSYSMHWVRQAPGKGLEWVAYISSYDSITDYADSVKGRFTISADTSKNTAYLQMNSLRAEDTAVYYCARPAVGHMAFDYWGQGTLVTVSSASTKGPSVFPLAPSSKSTSGGTAALGCLVKDYFPEPVTVSWNSGALTSGVHTFPAVLQSSGLYSLSSVVTVPSSSLGTQTYICNVNHKPSNTKVDKKVEPKSCDKTHTCPPCPAPEAAGGPSVFLFPPKPKDTLMISRTPEVTCVVVDVSHEDPEVKFNWYVDGVEVHNAKTKPREEQYNSTYRVVSVLTVLHQDWLNGKEYKCKVSNKALPASIEKTISKAKGQPREPQVYTLPPCREEMTKNQVSLWCLVKGFYPSDIAVEWESNGQPENNYKTTPPVLDSDGSFFLYSKLTVDKSRWQQGNVFSCSVMHEALHNHYTQKSLSLSPGKGGGSGGGSGGGSGGGSGSTGEVQLVESGGGLVQPGGSLRLSCAASGFDFTAYAMHWVRQAPGKGLEWVASIYPSGGYTAYADSVKGRFTISADTSKNTAYLQMNSLRAEDTAVYYCARRSYYFALDYWGQGTLVTVSSGGGGSDIQMTQSPSSLSASVGDRVTITCRASQSVSSAVAWYQQKPGKAPKLLIYSASSLYSGVPSRFSGSRSGTDFTLTISSLQPEDFATYYCQQYWAYYSPITFGQGTKVEIK

SEQ ID NO: 937 - protein, 732 aa, Artificial Sequence
  Description of Artificial Sequence: Synthetic polypeptide
MNLLLILTFVAAAVAEVQLVESGGGLVQPGGSLRLSCAASGFDFSSSSIHWVRQAPGKGLEWVASISSSYGYTYYADSVKGRFTISADTSKNTAYLQMNSLRAEDTAVYYCARSWAMDYWGQGTLVTVSSGGGGSDIQMTQSPSSLSASVGDRVTITCRASQSVSSAVAWYQQKPGKAPKLLIYSASDLYSGVPSRFSGSRSGTDFTLTISSLQPEDFATYYCQQYAGAGLITFGQGTKVEIKGGGGSGGGGSEPKSSDKTHTCPPCPAPEAAGGPSVFLFPPKPKDTLMISRTPEVTCVVVDVSHEDPEVKFNWYVDGVEVHNAKTKPREEQYNSTYRVVSVLTVLHQDWLNGKEYKCKVSNKALPASIEKTISKAKGQPREPQVYTLPPIRELMTSNQVSLSCAVKGFYPSDIAVEWESNGQPENNYKTTPPVLDSDGSFFLVSKLTVDKSRWQQGNVFSCSVMHEALHNHYTQKSLSLSPGKGGGSGGGSGGGSGGGSGSTGEVQLVESGGGLVQPGGSLRLSCAASGFTLSSYSMHWVRQAPGKGLEWVAYISSYDSITDYADSVKGRFTISADTSKNTAYLQMNSLRAEDTAVYYCARPAVGHMAFDYWGQGTLVTVSSASTKGPSVFPLAPSSKSTSGGTAALGCLVKDYFPEPVTVSWNSGALTSGVHTFPAVLQSSGLYSLSSVVTVPSSSLGTQTYICNVNHKPSNTKVDKKVEPKSCDKTHT

SEQ ID NO: 938 - protein, 732 aa, Artificial Sequence
  Description of Artificial Sequence: Synthetic polypeptide
MNLLLILTFVAAAVAEVQLVESGGGLVQPGGSLRLSCAASGFDFSSSSIHWVRQAPGKGLEWVASISSSYGYTYYADSVKGRFTISADTSKNTAYLQMNSLRAEDTAVYYCARSWAMDYWGQGTLVTVSSGGGGSDIQMTQSPSSLSASVGDRVTITCRASQSVSSAVAWYQQKPGKAPKLLIYSASDLYSGVPSRFSGSRSGTDFTLTISSLQPEDFATYYCQQYAGAGLITFGQGTKVEIKGGGGSGGGGSEPKSSDKTHTCPPCPAPEAAGGPSVFLFPPKPKDTLMISRTPEVTCVVVDVSHEDPEVKFNWYVDGVEVHNAKTKPREEQYNSTYRVVSVLTVLHQDWLNGKEYKCKVSNKALPASIEKTISKAKGQPREPQVYTLPPSREEMTKNQVSLSCAVKGFYPSDIAVEWESNGQPENNYKTTPPVLDSDGSFFLVSKLTVDKSRWQQGNVFSCSVMHEALHNHYTQKSLSLSPGKGGGSGGGSGGGSGGGSGSTGEVQLVESGGGLVQPGGSLRLSCAASGFTLSSYSMHWVRQAPGKGLEWVAYISSYDSITDYADSVKGRFTISADTSKNTAYLQMNSLRAEDTAVYYCARPAVGHMAFDYWGQGTLVTVSSASTKGPSVFPLAPSSKSTSGGTAALGCLVKDYFPEPVTVSWNSGALTSGVHTFPAVLQSSGLYSLSSVVTVPSSSLGTQTYICNVNHKPSNTKVDKKVEPKSCDKTHT

SEQ ID NO: 939 - protein, 732 aa, Artificial Sequence
  Description of Artificial Sequence: Synthetic polypeptide
MNLLLILTFVAAAVAEVQLVESGGGLVQPGGSLRLSCAASGFDFSSSSIHWVRQAPGKGLEWVASISSSYGYTYYADSVKGRFTISADTSKNTAYLQMNSLRAEDTAVYYCARSWAMDYWGQGTLVTVSSGGGGSDIQMTQSPSSLSASVGDRVTITCRASQSVSSAVAWYQQKPGKAPKLLIYSASDLYSGVPSRFSGSRSGTDFTLTISSLQPEDFATYYCQQYAGAGLITFGQGTKVEIKGGGGSGGGGSEPKSSDKTHTCPPCPAPEAAGGPSVFLFPPKPKDTLMISRTPEVTCVVVDVSHEDPEVKFNWYVDGVEVHNAKTKPREEQYNSTYRVVSVLTVLHQDWLNGKEYKCKVSNKALPASIEKTISKAKGQPREPQVCTLPPSREEMTKNQVSLSCAVKGFYPSDIAVEWESNGQPENNYKTTPPVLDSDGSFFLVSKLTVDKSRWQQGNVFSCSVMHEALHNHYTQKSLSLSPGKGGGSGGGSGGGSGGGSGSTGEVQLVESGGGLVQPGGSLRLSCAASGFTLSSYSMHWVRQAPGKGLEWVAYISSYDSITDYADSVKGRFTISADTSKNTAYLQMNSLRAEDTAVYYCARPAVGHMAFDYWGQGTLVTVSSASTKGPSVFPLAPSSKSTSGGTAALGCLVKDYFPEPVTVSWNSGALTSGVHTFPAVLQSSGLYSLSSVVTVPSSSLGTQTYICNVNHKPSNTKVDKKVEPKSCDKTHT

SEQ ID NO: 940 - protein, 717 aa, Artificial Sequence
  Description of Artificial Sequence: Synthetic polypeptide
EVQLVESGGGLVQPGGSLRLSCAASGFDFSSSSIHWVRQAPGKGLEWVASISSSYGYTYYADSVKGRFTISADTSKNTAYLQMNSLRAEDTAVYYCARSWAMDYWGQGTLVTVSSGGGGSDIQMTQSPSSLSASVGDRVTITCRASQSVSSAVAWYQQKPGKAPKLLIYSASDLYSGVPSRFSGSRSGTDFTLTISSLQPEDFATYYCQQYAGAGLITFGQGTKVEIKGGGGSGGGGSEPKSSDKTHTCPPCPAPELLGGPSVFLFPPKPKDTLMISRTPEVTCVVVAVSHEDPEVKFNWYVDGVEVHNAKTKPREEQYGSTYRVVSVLTVLHQDWLNGKEYKCKVSNKALPAPIEKTISKAKGQPREPQVYTLPPIRELMTSNQVSLSCAVKGFYPSDIAVEWESNGQPENNYKTTPPVLDSDGSFFLVSKLTVDKSRWQQGNVFSCSVMHEALHNHYTQKSLSLSPGKGGGSGGGSGGGSGGGSGSTGEVQLVESGGGLVQPGGSLRLSCAASGFTLSSYSMHWVRQAPGKGLEWVAYISSYDSITDYADSVKGRFTISADTSKNTAYLQMNSLRAEDTAVYYCARPAVGHMAFDYWGQGTLVTVSSASTKGPSVFPLAPSSKSTSGGTAALGCLVKDYFPEPVTVSWNSGALTSGVHTFPAVLQSSGLYSLSSVVTVPSSSLGTQTYICNVNHKPSNTKVDKKVEPKSCDKTHT

SEQ ID NO: 941 - protein, 717 aa, Artificial Sequence
  Description of Artificial Sequence: Synthetic polypeptide
EVQLVESGGGLVQPGGSLRLSCAASGFDFSSSSIHWVRQAPGKGLEWVASISSSYGYTYYADSVKGRFTISADTSKNTAYLQMNSLRAEDTAVYYCARSWAMDYWGQGTLVTVSSGGGGSDIQMTQSPSSLSASVGDRVTITCRASQSVSSAVAWYQQKPGKAPKLLIYSASDLYSGVPSRFSGSRSGTDFTLTISSLQPEDFATYYCQQYAGAGLITFGQGTKVEIKGGGGSGGGGSEPKSSDKTHTCPPCPAPEAAGGPSVFLFPPKPKDTLMISRTPEVTCVVVDVSHEDPEVKFNWYVDGVEVHNAKTKPREEQYNSTYRVVSVLTVLHQDWLNGKEYKCKVSNKALPASIEKTISKAKGQPREPQVYTLPPIRELMTSNQVSLSCAVKGFYPSDIAVEWESNGQPENNYKTTPPVLDSDGSFFLVSKLTVDKSRWQQGNVFSCSVMHEALHNHYTQKSLSLSPGKGGGSGGGSGGGSGGGSGSTGEVQLVESGGGLVQPGGSLRLSCAASGFTLSSYSMHWVRQAPGKGLEWVAYISSYDSITDYADSVKGRFTISADTSKNTAYLQMNSLRAEDTAVYYCARPAVGHMAFDYWGQGTLVTVSSASTKGPSVFPLAPSSKSTSGGTAALGCLVKDYFPEPVTVSWNSGALTSGVHTFPAVLQSSGLYSLSSVVTVPSSSLGTQTYICNVNHKPSNTKVDKKVEPKSCDKTHT

SEQ ID NO: 942 - protein, 717 aa, Artificial Sequence
  Description of Artificial Sequence: Synthetic polypeptide
EVQLVESGGGLVQPGGSLRLSCAASGFDFSSSSIHWVRQAPGKGLEWVASISSSYGYTYYADSVKGRFTISADTSKNTAYLQMNSLRAEDTAVYYCARSWAMDYWGQGTLVTVSSGGGGSDIQMTQSPSSLSASVGDRVTITCRASQSVSSAVAWYQQKPGKAPKLLIYSASDLYSGVPSRFSGSRSGTDFTLTISSLQPEDFATYYCQQYAGAGLITFGQGTKVEIKGGGGSGGGGSEPKSSDKTHTCPPCPAPEAAGGPSVFLFPPKPKDTLMISRTPEVTCVVVDVSHEDPEVKFNWYVDGVEVHNAKTKPREEQYNSTYRVVSVLTVLHQDWLNGKEYKCKVSNKALPASIEKTISKAKGQPREPQVYTLPPSREEMTKNQVSLSCAVKGFYPSDIAVEWESNGQPENNYKTTPPVLDSDGSFFLVSKLTVDKSRWQQGNVFSCSVMHEALHNHYTQKSLSLSPGKGGGSGGGSGGGSGGGSGSTGEVQLVESGGGLVQPGGSLRLSCAASGFTLSSYSMHWVRQAPGKGLEWVAYISSYDSITDYADSVKGRFTISADTSKNTAYLQMNSLRAEDTAVYYCARPAVGHMAFDYWGQGTLVTVSSASTKGPSVFPLAPSSKSTSGGTAALGCLVKDYFPEPVTVSWNSGALTSGVHTFPAVLQSSGLYSLSSVVTVPSSSLGTQTYICNVNHKPSNTKVDKKVEPKSCDKTHT

SEQ ID NO: 943 - protein, 717 aa, Artificial Sequence
  Description of Artificial Sequence: Synthetic polypeptide
EVQLVESGGGLVQPGGSLRLSCAASGFDFSSSSIHWVRQAPGKGLEWVASISSSYGYTYYADSVKGRFTISADTSKNTAYLQMNSLRAEDTAVYYCARSWAMDYWGQGTLVTVSSGGGGSDIQMTQSPSSLSASVGDRVTITCRASQSVSSAVAWYQQKPGKAPKLLIYSASDLYSGVPSRFSGSRSGTDFTLTISSLQPEDFATYYCQQYAGAGLITFGQGTKVEIKGGGGSGGGGSEPKSSDKTHTCPPCPAPEAAGGPSVFLFPPKPKDTLMISRTPEVTCVVVDVSHEDPEVKFNWYVDGVEVHNAKTKPREEQYNSTYRVVSVLTVLHQDWLNGKEYKCKVSNKALPASIEKTISKAKGQPREPQVCTLPPSREEMTKNQVSLSCAVKGFYPSDIAVEWESNGQPENNYKTTPPVLDSDGSFFLVSKLTVDKSRWQQGNVFSCSVMHEALHNHYTQKSLSLSPGKGGGSGGGSGGGSGGGSGSTGEVQLVESGGGLVQPGGSLRLSCAASGFTLSSYSMHWVRQAPGKGLEWVAYISSYDSITDYADSVKGRFTISADTSKNTAYLQMNSLRAEDTAVYYCARPAVGHMAFDYWGQGTLVTVSSASTKGPSVFPLAPSSKSTSGGTAALGCLVKDYFPEPVTVSWNSGALTSGVHTFPAVLQSSGLYSLSSVVTVPSSSLGTQTYICNVNHKPSNTKVDKKVEPKSCDKTHT

SEQ ID NO: 944 - protein, 736 aa, Artificial Sequence
  Description of Artificial Sequence: Synthetic polypeptide
MNLLLILTFVAAAVAEVQLVESGGGLVQPGGSLRLSCAASGFDFTAYAMHWVRQAPGKGLEWVASIYPSGGYTAYADSVKGRFTISADTSKNTAYLQMNSLRAEDTAVYYCARRSYYFALDYWGQGTLVTVSSGGGGSDIQMTQSPSSLSASVGDRVTITCRASQSVSSAVAWYQQKPGKAPKLLIYSASSLYSGVPSRFSGSRSGTDFTLTISSLQPEDFATYYCQQYWAYYSPITFGQGTKVEIKGGGGSGGGGSEPKSSDKTHTCPPCPAPELLGGPSVFLFPPKPKDTLMISRTPEVTCVVVAVSHEDPEVKFNWYVDGVEVHNAKTKPREEQYGSTYRVVSVLTVLHQDWLNGKEYKCKVSNKALPAPIEKTISKAKGQPREPMVFDLPPSREEMTKNQVSLWCMVKGFYPSDIAVEWESNGQPENNYKTTPPVLDSDGSFFLYSKLTVDKSRWQQGNVFSCSVMHEALHNHYTQKSLSLSPGKGGGSGGGSGGGSGGGSGSTGEVQLVESGGGLVQPGGSLRLSCAASGFTLSSYSMHWVRQAPGKGLEWVAYISSYDSITDYADSVKGRFTISADTSKNTAYLQMNSLRAEDTAVYYCARPAVGHMAFDYWGQGTLVTVSSASTKGPSVFPLAPSSKSTSGGTAALGCLVKDYFPEPVTVSWNSGALTSGVHTFPAVLQSSGLYSLSSVVTVPSSSLGTQTYICNVNHKPSNTKVDKKVEPKSCDKTHT

SEQ ID NO: 945 - protein, 736 aa, Artificial Sequence
  Description of Artificial Sequence: Synthetic polypeptide
MNLLLILTFVAAAVAEVQLVESGGGLVQPGGSLRLSCAASGFDFTAYAMHWVRQAPGKGLEWVASIYPSGGYTAYADSVKGRFTISADTSKNTAYLQMNSLRAEDTAVYYCARRSYYFALDYWGQGTLVTVSSGGGGSDIQMTQSPSSLSASVGDRVTITCRASQSVSSAVAWYQQKPGKAPKLLIYSASSLYSGVPSRFSGSRSGTDFTLTISSLQPEDFATYYCQQYWAYYSPITFGQGTKVEIKGGGGSGGGGSEPKSSDKTHTCPPCPAPEAAGGPSVFLFPPKPKDTLMISRTPEVTCVVVDVSHEDPEVKFNWYVDGVEVHNAKTKPREEQYNSTYRVVSVLTVLHQDWLNGKEYKCKVSNKALPASIEKTISKAKGQPREPMVFDLPPSREEMTKNQVSLWCMVKGFYPSDIAVEWESNGQPENNYKTTPPVLDSDGSFFLYSKLTVDKSRWQQGNVFSCSVMHEALHNHYTQKSLSLSPGKGGGSGGGSGGGSGGGSGSTGEVQLVESGGGLVQPGGSLRLSCAASGFTLSSYSMHWVRQAPGKGLEWVAYISSYDSITDYADSVKGRFTISADTSKNTAYLQMNSLRAEDTAVYYCARPAVGHMAFDYWGQGTLVTVSSASTKGPSVFPLAPSSKSTSGGTAALGCLVKDYFPEPVTVSWNSGALTSGVHTFPAVLQSSGLYSLSSVVTVPSSSLGTQTYICNVNHKPSNTKVDKKVEPKSCDKTHT

SEQ ID NO: 946 - protein, 736 aa, Artificial Sequence
  Description of Artificial Sequence: Synthetic polypeptide
MNLLLILTFVAAAVAEVQLVESGGGLVQPGGSLRLSCAASGFDFTAYAMHWVRQAPGKGLEWVASIYPSGGYTAYADSVKGRFTISADTSKNTAYLQMNSLRAEDTAVYYCARRSYYFALDYWGQGTLVTVSSGGGGSDIQMTQSPSSLSASVGDRVTITCRASQSVSSAVAWYQQKPGKAPKLLIYSASSLYSGVPSRFSGSRSGTDFTLTISSLQPEDFATYYCQQYWAYYSPITFGQGTKVEIKGGGGSGGGGSEPKSSDKTHTCPPCPAPEAAGGPSVFLFPPKPKDTLMISRTPEVTCVVVDVSHEDPEVKFNWYVDGVEVHNAKTKPREEQYNSTYRVVSVLTVLHQDWLNGKEYKCKVSNKALPASIEKTISKAKGQPREPQVYTLPPSREEMTKNQVSLWCLVKGFYPSDIAVEWESNGQPENNYKTTPPVLDSDGSFFLYSKLTVDKSRWQQGNVFSCSVMHEALHNHYTQKSLSLSPGKGGGSGGGSGGGSGGGSGSTGEVQLVESGGGLVQPGGSLRLSCAASGFTLSSYSMHWVRQAPGKGLEWVAYISSYDSITDYADSVKGRFTISADTSKNTAYLQMNSLRAEDTAVYYCARPAVGHMAFDYWGQGTLVTVSSASTKGPSVFPLAPSSKSTSGGTAALGCLVKDYFPEPVTVSWNSGALTSGVHTFPAVLQSSGLYSLSSVVTVPSSSLGTQTYICNVNHKPSNTKVDKKVEPKSCDKTHT

SEQ ID NO: 947 - protein, 736 aa, Artificial Sequence
  Description of Artificial Sequence: Synthetic polypeptide
MNLLLILTFVAAAVAEVQLVESGGGLVQPGGSLRLSCAASGFDFTAYAMHWVRQAPGKGLEWVASIYPSGGYTAYADSVKGRFTISADTSKNTAYLQMNSLRAEDTAVYYCARRSYYFALDYWGQGTLVTVSSGGGGSDIQMTQSPSSLSASVGDRVTITCRASQSVSSAVAWYQQKPGKAPKLLIYSASSLYSGVPSRFSGSRSGTDFTLTISSLQPEDFATYYCQQYWAYYSPITFGQGTKVEIKGGGGSGGGGSEPKSSDKTHTCPPCPAPEAAGGPSVFLFPPKPKDTLMISRTPEVTCVVVDVSHEDPEVKFNWYVDGVEVHNAKTKPREEQYNSTYRVVSVLTVLHQDWLNGKEYKCKVSNKALPASIEKTISKAKGQPREPQVYTLPPCREEMTKNQVSLWCLVKGFYPSDIAVEWESNGQPENNYKTTPPVLDSDGSFFLYSKLTVDKSRWQQGNVFSCSVMHEALHNHYTQKSLSLSPGKGGGSGGGSGGGSGGGSGSTGEVQLVESGGGLVQPGGSLRLSCAASGFTLSSYSMHWVRQAPGKGLEWVAYISSYDSITDYADSVKGRFTISADTSKNTAYLQMNSLRAEDTAVYYCARPAVGHMAFDYWGQGTLVTVSSASTKGPSVFPLAPSSKSTSGGTAALGCLVKDYFPEPVTVSWNSGALTSGVHTFPAVLQSSGLYSLSSVVTVPSSSLGTQTYICNVNHKPSNTKVDKKVEPKSCDKTHT

SEQ ID NO: 948 - protein, 721 aa, Artificial Sequence
  Description of Artificial Sequence: Synthetic polypeptide
EVQLVESGGGLVQPGGSLRLSCAASGFDFTAYAMHWVRQAPGKGLEWVASIYPSGGYTAYADSVKGRFTISADTSKNTAYLQMNSLRAEDTAVYYCARRSYYFALDYWGQGTLVTVSSGGGGSDIQMTQSPSSLSASVGDRVTITCRASQSVSSAVAWYQQKPGKAPKLLIYSASSLYSGVPSRFSGSRSGTDFTLTISSLQPEDFATYYCQQYWAYYSPITFGQGTKVEIKGGGGSGGGGSEPKSSDKTHTCPPCPAPELLGGPSVFLFPPKPKDTLMISRTPEVTCVVVAVSHEDPEVKFNWYVDGVEVHNAKTKPREEQYGSTYRVVSVLTVLHQDWLNGKEYKCKVSNKALPAPIEKTISKAKGQPREPMVFDLPPSREEMTKNQVSLWCMVKGFYPSDIAVEWESNGQPENNYKTTPPVLDSDGSFFLYSKLTVDKSRWQQGNVFSCSVMHEALHNHYTQKSLSLSPGKGGGSGGGSGGGSGGGSGSTGEVQLVESGGGLVQPGGSLRLSCAASGFTLSSYSMHWVRQAPGKGLEWVAYISSYDSITDYADSVKGRFTISADTSKNTAYLQMNSLRAEDTAVYYCARPAVGHMAFDYWGQGTLVTVSSASTKGPSVFPLAPSSKSTSGGTAALGCLVKDYFPEPVTVSWNSGALTSGVHTFPAVLQSSGLYSLSSVVTVPSSSLGTQTYICNVNHKPSNTKVDKKVEPKSCDKTHT

SEQ ID NO: 949 - protein, 721 aa, Artificial Sequence
  Description of Artificial Sequence: Synthetic polypeptide
EVQLVESGGGLVQPGGSLRLSCAASGFDFTAYAMHWVRQAPGKGLEWVASIYPSGGYTAYADSVKGRFTISADTSKNTAYLQMNSLRAEDTAVYYCARRSYYFALDYWGQGTLVTVSSGGGGSDIQMTQSPSSLSASVGDRVTITCRASQSVSSAVAWYQQKPGKAPKLLIYSASSLYSGVPSRFSGSRSGTDFTLTISSLQPEDFATYYCQQYWAYYSPITFGQGTKVEIKGGGGSGGGGSEPKSSDKTHTCPPCPAPEAAGGPSVFLFPPKPKDTLMISRTPEVTCVVVDVSHEDPEVKFNWYVDGVEVHNAKTKPREEQYNSTYRVVSVLTVLHQDWLNGKEYKCKVSNKALPASIEKTISKAKGQPREPMVFDLPPSREEMTKNQVSLWCMVKGFYPSDIAVEWESNGQPENNYKTTPPVLDSDGSFFLYSKLTVDKSRWQQGNVFSCSVMHEALHNHYTQKSLSLSPGKGGGSGGGSGGGSGGGSGSTGEVQLVESGGGLVQPGGSLRLSCAASGFTLSSYSMHWVRQAPGKGLEWVAYISSYDSITDYADSVKGRFTISADTSKNTAYLQMNSLRAEDTAVYYCARPAVGHMAFDYWGQGTLVTVSSASTKGPSVFPLAPSSKSTSGGTAALGCLVKDYFPEPVTVSWNSGALTSGVHTFPAVLQSSGLYSLSSVVTVPSSSLGTQTYICNVNHKPSNTKVDKKVEPKSCDKTHT

SEQ ID NO: 950 - protein, 721 aa, Artificial Sequence
  Description of Artificial Sequence: Synthetic polypeptide
EVQLVESGGGLVQPGGSLRLSCAASGFDFTAYAMHWVRQAPGKGLEWVASIYPSGGYTAYADSVKGRFTISADTSKNTAYLQMNSLRAEDTAVYYCARRSYYFALDYWGQGTLVTVSSGGGGSDIQMTQSPSSLSASVGDRVTITCRASQSVSSAVAWYQQKPGKAPKLLIYSASSLYSGVPSRFSGSRSGTDFTLTISSLQPEDFATYYCQQYWAYYSPITFGQGTKVEIKGGGGSGGGGSEPKSSDKTHTCPPCPAPEAAGGPSVFLFPPKPKDTLMISRTPEVTCVVVDVSHEDPEVKFNWYVDGVEVHNAKTKPREEQYNSTYRVVSVLTVLHQDWLNGKEYKCKVSNKALPASIEKTISKAKGQPREPQVYTLPPSREEMTKNQVSLWCLVKGFYPSDIAVEWESNGQPENNYKTTPPVLDSDGSFFLYSKLTVDKSRWQQGNVFSCSVMHEALHNHYTQKSLSLSPGKGGGSGGGSGGGSGGGSGSTGEVQLVESGGGLVQPGGSLRLSCAASGFTLSSYSMHWVRQAPGKGLEWVAYISSYDSITDYADSVKGRFTISADTSKNTAYLQMNSLRAEDTAVYYCARPAVGHMAFDYWGQGTLVTVSSASTKGPSVFPLAPSSKSTSGGTAALGCLVKDYFPEPVTVSWNSGALTSGVHTFPAVLQSSGLYSLSSVVTVPSSSLGTQTYICNVNHKPSNTKVDKKVEPKSCDKTHT

SEQ ID NO: 951 - protein, 721 aa, Artificial Sequence
  Description of Artificial Sequence: Synthetic polypeptide
EVQLVESGGGLVQPGGSLRLSCAASGFDFTAYAMHWVRQAPGKGLEWVASIYPSGGYTAYADSVKGRFTISADTSKNTAYLQMNSLRAEDTAVYYCARRSYYFALDYWGQGTLVTVSSGGGGSDIQMTQSPSSLSASVGDRVTITCRASQSVSSAVAWYQQKPGKAPKLLIYSASSLYSGVPSRFSGSRSGTDFTLTISSLQPEDFATYYCQQYWAYYSPITFGQGTKVEIKGGGGSGGGGSEPKSSDKTHTCPPCPAPEAAGGPSVFLFPPKPKDTLMISRTPEVTCVVVDVSHEDPEVKFNWYVDGVEVHNAKTKPREEQYNSTYRVVSVLTVLHQDWLNGKEYKCKVSNKALPASIEKTISKAKGQPREPQVYTLPPCREEMTKNQVSLWCLVKGFYPSDIAVEWESNGQPENNYKTTPPVLDSDGSFFLYSKLTVDKSRWQQGNVFSCSVMHEALHNHYTQKSLSLSPGKGGGSGGGSGGGSGGGSGSTGEVQLVESGGGLVQPGGSLRLSCAASGFTLSSYSMHWVRQAPGKGLEWVAYISSYDSITDYADSVKGRFTISADTSKNTAYLQMNSLRAEDTAVYYCARPAVGHMAFDYWGQGTLVTVSSASTKGPSVFPLAPSSKSTSGGTAALGCLVKDYFPEPVTVSWNSGALTSGVHTFPAVLQSSGLYSLSSVVTVPSSSLGTQTYICNVNHKPSNTKVDKKVEPKSCDKTHT

SEQ ID NO: 952 - protein, 214 aa, Artificial Sequence
  Description of Artificial Sequence: Synthetic polypeptide
DIQMTQSPSSLSASVGDRVTITCRASQSVSSAVAWYQQKPGKAPKLLIYSASSLYSGVPSRFSGSRSGTDFTLTISSLQPEDFATYYCQQWYNAPITFGQGTKVEIKRTVAAPSVFIFPPSDEQLKSGTASVVCLLNNFYPREAKVQWKVDNALQSGNSQESVTEQDSKDSTYSLSSTLTLSKADYEKHKVYACEVTHQGLSSPVTKSFNRGEC

SEQ ID NO: 953 - protein, 713 aa, Artificial Sequence
  Description of Artificial Sequence: Synthetic polypeptide
MNLLLILTFVAAAVAEVQLVESGGGLVQPGGSLRLSCAASGFTSDFYFIHWVRQAPGKGLEWVATIYPFIGNTYYADSVKGRFTISADTSKNTAYLQMNSLRAEDTAVYYCARAFPGSYHPFDYWGQGTLVTVSSASTKGPSVFPLAPSSKSTSGGTAALGCLVKDYFPEPVTVSWNSGALTSGVHTFPAVLQSSGLYSLSSVVTVPSSSLGTQTYICNVNHKPSNTKVDKKVEPKSCDKTHTCPPCPAPELLGGPSVFLFPPKPKDTLMISRTPEVTCVVVAVSHEDPEVKFNWYVDGVEVHNAKTKPREEQYGSTYRVVSVLTVLHQDWLNGKEYKCKVSNKALPAPIEKTISKAKGQPREPQVYTLPPIRELMTSNQVSLSCAVKGFYPSDIAVEWESNGQPENNYKTTPPVLDSDGSFFLVSKLTVDKSRWQQGNVFSCSVMHEALHNHYTQKSLSLSPGKGGGSGGGSGGGSGGGSGSTGEVQLVESGGGLVQPGGSLRLSCAASGFDFSSSSIHWVRQAPGKGLEWVASISSSYGYTYYADSVKGRFTISADTSKNTAYLQMNSLRAEDTAVYYCARSWAMDYWGQGTLVTVSSGGGGSDIQMTQSPSSLSASVGDRVTITCRASQSVSSAVAWYQQKPGKAPKLLIYSASDLYSGVPSRFSGSRSGTDFTLTISSLQPEDFATYYCQQYAGAGLITFGQGTKVEIK

SEQ ID NO: 954 - protein, 713 aa, Artificial Sequence
  Description of Artificial Sequence: Synthetic polypeptide
MNLLLILTFVAAAVAEVQLVESGGGLVQPGGSLRLSCAASGFTSDFYFIHWVRQAPGKGLEWVATIYPFIGNTYYADSVKGRFTISADTSKNTAYLQMNSLRAEDTAVYYCARAFPGSYHPFDYWGQGTLVTVSSASTKGPSVFPLAPSSKSTSGGTAALGCLVKDYFPEPVTVSWNSGALTSGVHTFPAVLQSSGLYSLSSVVTVPSSSLGTQTYICNVNHKPSNTKVDKKVEPKSCDKTHTCPPCPAPEAAGGPSVFLFPPKPKDTLMISRTPEVTCVVVDVSHEDPEVKFNWYVDGVEVHNAKTKPREEQYNSTYRVVSVLTVLHQDWLNGKEYKCKVSNKALPASIEKTISKAKGQPREPQVYTLPPIRELMTSNQVSLSCAVKGFYPSDIAVEWESNGQPENNYKTTPPVLDSDGSFFLVSKLTVDKSRWQQGNVFSCSVMHEALHNHYTQKSLSLSPGKGGGSGGGSGGGSGGGSGSTGEVQLVESGGGLVQPGGSLRLSCAASGFDFSSSSIHWVRQAPGKGLEWVASISSSYGYTYYADSVKGRFTISADTSKNTAYLQMNSLRAEDTAVYYCARSWAMDYWGQGTLVTVSSGGGGSDIQMTQSPSSLSASVGDRVTITCRASQSVSSAVAWYQQKPGKAPKLLIYSASDLYSGVPSRFSGSRSGTDFTLTISSLQPEDFATYYCQQYAGAGLITFGQGTKVEIK

SEQ ID NO: 955 - protein, 713 aa, Artificial Sequence
  Description of Artificial Sequence: Synthetic polypeptide
MNLLLILTFVAAAVAEVQLVESGGGLVQPGGSLRLSCAASGFTSDFYFIHWVRQAPGKGLEWVATIYPFIGNTYYADSVKGRFTISADTSKNTAYLQMNSLRAEDTAVYYCARAFPGSYHPFDYWGQGTLVTVSSASTKGPSVFPLAPSSKSTSGGTAALGCLVKDYFPEPVTVSWNSGALTSGVHTFPAVLQSSGLYSLSSVVTVPSSSLGTQTYICNVNHKPSNTKVDKKVEPKSCDKTHTCPPCPAPEAAGGPSVFLFPPKPKDTLMISRTPEVTCVVVDVSHEDPEVKFNWYVDGVEVHNAKTKPREEQYNSTYRVVSVLTVLHQDWLNGKEYKCKVSNKALPASIEKTISKAKGQPREPQVYTLPPSREEMTKNQVSLSCAVKGFYPSDIAVEWESNGQPENNYKTTPPVLDSDGSFFLVSKLTVDKSRWQQGNVFSCSVMHEALHNHYTQKSLSLSPGKGGGSGGGSGGGSGGGSGSTGEVQLVESGGGLVQPGGSLRLSCAASGFDFSSSSIHWVRQAPGKGLEWVASISSSYGYTYYADSVKGRFTISADTSKNTAYLQMNSLRAEDTAVYYCARSWAMDYWGQGTLVTVSSGGGGSDIQMTQSPSSLSASVGDRVTITCRASQSVSSAVAWYQQKPGKAPKLLIYSASDLYSGVPSRFSGSRSGTDFTLTISSLQPEDFATYYCQQYAGAGLITFGQGTKVEIK

SEQ ID NO: 956 - protein, 713 aa, Artificial Sequence
  Description of Artificial Sequence: Synthetic polypeptide
MNLLLILTFVAAAVAEVQLVESGGGLVQPGGSLRLSCAASGFTSDFYFIHWVRQAPGKGLEWVATIYPFIGNTYYADSVKGRFTISADTSKNTAYLQMNSLRAEDTAVYYCARAFPGSYHPFDYWGQGTLVTVSSASTKGPSVFPLAPSSKSTSGGTAALGCLVKDYFPEPVTVSWNSGALTSGVHTFPAVLQSSGLYSLSSVVTVPSSSLGTQTYICNVNHKPSNTKVDKKVEPKSCDKTHTCPPCPAPEAAGGPSVFLFPPKPKDTLMISRTPEVTCVVVDVSHEDPEVKFNWYVDGVEVHNAKTKPREEQYNSTYRVVSVLTVLHQDWLNGKEYKCKVSNKALPASIEKTISKAKGQPREPQVCTLPPSREEMTKNQVSLSCAVKGFYPSDIAVEWESNGQPENNYKTTPPVLDSDGSFFLVSKLTVDKSRWQQGNVFSCSVMHEALHNHYTQKSLSLSPGKGGGSGGGSGGGSGGGSGSTGEVQLVESGGGLVQPGGSLRLSCAASGFDFSSSSIHWVRQAPGKGLEWVASISSSYGYTYYADSVKGRFTISADTSKNTAYLQMNSLRAEDTAVYYCARSWAMDYWGQGTLVTVSSGGGGSDIQMTQSPSSLSASVGDRVTITCRASQSVSSAVAWYQQKPGKAPKLLIYSASDLYSGVPSRFSGSRSGTDFTLTISSLQPEDFATYYCQQYAGAGLITFGQGTKVEIK

SEQ ID NO: 957 - protein, 698 aa, Artificial Sequence
  Description of Artificial Sequence: Synthetic polypeptide
EVQLVESGGGLVQPGGSLRLSCAASGFTSDFYFIHWVRQAPGKGLEWVATIYPFIGNTYYADSVKGRFTISADTSKNTAYLQMNSLRAEDTAVYYCARAFPGSYHPFDYWGQGTLVTVSSASTKGPSVFPLAPSSKSTSGGTAALGCLVKDYFPEPVTVSWNSGALTSGVHTFPAVLQSSGLYSLSSVVTVPSSSLGTQTYICNVNHKPSNTKVDKKVEPKSCDKTHTCPPCPAPELLGGPSVFLFPPKPKDTLMISRTPEVTCVVVAVSHEDPEVKFNWYVDGVEVHNAKTKPREEQYGSTYRVVSVLTVLHQDWLNGKEYKCKVSNKALPAPIEKTISKAKGQPREPQVYTLPPIRELMTSNQVSLSCAVKGFYPSDIAVEWESNGQPENNYKTTPPVLDSDGSFFLVSKLTVDKSRWQQGNVFSCSVMHEALHNHYTQKSLSLSPGKGGGSGGGSGGGSGGGSGSTGEVQLVESGGGLVQPGGSLRLSCAASGFDFSSSSIHWVRQAPGKGLEWVASISSSYGYTYYADSVKGRFTISADTSKNTAYLQMNSLRAEDTAVYYCARSWAMDYWGQGTLVTVSSGGGGSDIQMTQSPSSLSASVGDRVTITCRASQSVSSAVAWYQQKPGKAPKLLIYSASDLYSGVPSRFSGSRSGTDFTLTISSLQPEDFATYYCQQYAGAGLITFGQGTKVEIK

SEQ ID NO: 958 - protein, 698 aa, Artificial Sequence
  Description of Artificial Sequence: Synthetic polypeptide
EVQLVESGGGLVQPGGSLRLSCAASGFTSDFYFIHWVRQAPGKGLEWVATIYPFIGNTYYADSVKGRFTISADTSKNTAYLQMNSLRAEDTAVYYCARAFPGSYHPFDYWGQGTLVTVSSASTKGPSVFPLAPSSKSTSGGTAALGCLVKDYFPEPVTVSWNSGALTSGVHTFPAVLQSSGLYSLSSVVTVPSSSLGTQTYICNVNHKPSNTKVDKKVEPKSCDKTHTCPPCPAPEAAGGPSVFLFPPKPKDTLMISRTPEVTCVVVDVSHEDPEVKFNWYVDGVEVHNAKTKPREEQYNSTYRVVSVLTVLHQDWLNGKEYKCKVSNKALPASIEKTISKAKGQPREPQVYTLPPIRELMTSNQVSLSCAVKGFYPSDIAVEWESNGQPENNYKTTPPVLDSDGSFFLVSKLTVDKSRWQQGNVFSCSVMHEALHNHYTQKSLSLSPGKGGGSGGGSGGGSGGGSGSTGEVQLVESGGGLVQPGGSLRLSCAASGFDFSSSSIHWVRQAPGKGLEWVASISSSYGYTYYADSVKGRFTISADTSKNTAYLQMNSLRAEDTAVYYCARSWAMDYWGQGTLVTVSSGGGGSDIQMTQSPSSLSASVGDRVTITCRASQSVSSAVAWYQQKPGKAPKLLIYSASDLYSGVPSRFSGSRSGTDFTLTISSLQPEDFATYYCQQYAGAGLITFGQGTKVEIK

SEQ ID NO: 959 - protein, 698 aa, Artificial Sequence
  Description of Artificial Sequence: Synthetic polypeptide
EVQLVESGGGLVQPGGSLRLSCAASGFTSDFYFIHWVRQAPGKGLEWVATIYPFIGNTYYADSVKGRFTISADTSKNTAYLQMNSLRAEDTAVYYCARAFPGSYHPFDYWGQGTLVTVSSASTKGPSVFPLAPSSKSTSGGTAALGCLVKDYFPEPVTVSWNSGALTSGVHTFPAVLQSSGLYSLSSVVTVPSSSLGTQTYICNVNHKPSNTKVDKKVEPKSCDKTHTCPPCPAPEAAGGPSVFLFPPKPKDTLMISRTPEVTCVVVDVSHEDPEVKFNWYVDGVEVHNAKTKPREEQYNSTYRVVSVLTVLHQDWLNGKEYKCKVSNKALPASIEKTISKAKGQPREPQVYTLPPSREEMTKNQVSLSCAVKGFYPSDIAVEWESNGQPENNYKTTPPVLDSDGSFFLVSKLTVDKSRWQQGNVFSCSVMHEALHNHYTQKSLSLSPGKGGGSGGGSGGGSGGGSGSTGEVQLVESGGGLVQPGGSLRLSCAASGFDFSSSSIHWVRQAPGKGLEWVASISSSYGYTYYADSVKGRFTISADTSKNTAYLQMNSLRAEDTAVYYCARSWAMDYWGQGTLVTVSSGGGGSDIQMTQSPSSLSASVGDRVTITCRASQSVSSAVAWYQQKPGKAPKLLIYSASDLYSGVPSRFSGSRSGTDFTLTISSLQPEDFATYYCQQYAGAGLITFGQGTKVEIK

SEQ ID NO: 960 - protein, 698 aa, Artificial Sequence
  Description of Artificial Sequence: Synthetic polypeptide
EVQLVESGGGLVQPGGSLRLSCAASGFTSDFYFIHWVRQAPGKGLEWVATIYPFIGNTYYADSVKGRFTISADTSKNTAYLQMNSLRAEDTAVYYCARAFPGSYHPFDYWGQGTLVTVSSASTKGPSVFPLAPSSKSTSGGTAALGCLVKDYFPEPVTVSWNSGALTSGVHTFPAVLQSSGLYSLSSVVTVPSSSLGTQTYICNVNHKPSNTKVDKKVEPKSCDKTHTCPPCPAPEAAGGPSVFLFPPKPKDTLMISRTPEVTCVVVDVSHEDPEVKFNWYVDGVEVHNAKTKPREEQYNSTYRVVSVLTVLHQDWLNGKEYKCKVSNKALPASIEKTISKAKGQPREPQVCTLPPSREEMTKNQVSLSCAVKGFYPSDIAVEWESNGQPENNYKTTPPVLDSDGSFFLVSKLTVDKSRWQQGNVFSCSVMHEALHNHYTQKSLSLSPGKGGGSGGGSGGGSGGGSGSTGEVQLVESGGGLVQPGGSLRLSCAASGFDFSSSSIHWVRQAPGKGLEWVASISSSYGYTYYADSVKGRFTISADTSKNTAYLQMNSLRAEDTAVYYCARSWAMDYWGQGTLVTVSSGGGGSDIQMTQSPSSLSASVGDRVTITCRASQSVSSAVAWYQQKPGKAPKLLIYSASDLYSGVPSRFSGSRSGTDFTLTISSLQPEDFATYYCQQYAGAGLITFGQGTKVEIK

SEQ ID NO: 961 - protein, 717 aa, Artificial Sequence
  Description of Artificial Sequence: Synthetic polypeptide
MNLLLILTFVAAAVAEVQLVESGGGLVQPGGSLRLSCAASGFTSDFYFIHWVRQAPGKGLEWVATIYPFIGNTYYADSVKGRFTISADTSKNTAYLQMNSLRAEDTAVYYCARAFPGSYHPFDYWGQGTLVTVSSASTKGPSVFPLAPSSKSTSGGTAALGCLVKDYFPEPVTVSWNSGALTSGVHTFPAVLQSSGLYSLSSVVTVPSSSLGTQTYICNVNHKPSNTKVDKKVEPKSCDKTHTCPPCPAPELLGGPSVFLFPPKPKDTLMISRTPEVTCVVVAVSHEDPEVKFNWYVDGVEVHNAKTKPREEQYGSTYRVVSVLTVLHQDWLNGKEYKCKVSNKALPAPIEKTISKAKGQPREPMVFDLPPSREEMTKNQVSLWCMVKGFYPSDIAVEWESNGQPENNYKTTPPVLDSDGSFFLYSKLTVDKSRWQQGNVFSCSVMHEALHNHYTQKSLSLSPGKGGGSGGGSGGGSGGGSGSTGEVQLVESGGGLVQPGGSLRLSCAASGFDFTAYAMHWVRQAPGKGLEWVASIYPSGGYTAYADSVKGRFTISADTSKNTAYLQMNSLRAEDTAVYYCARRSYYFALDYWGQGTLVTVSSGGGGSDIQMTQSPSSLSASVGDRVTITCRASQSVSSAVAWYQQKPGKAPKLLIYSASSLYSGVPSRFSGSRSGTDFTLTISSLQPEDFATYYCQQYWAYYSPITFGQGTKVEIK

SEQ ID NO: 962 - protein, 717 aa, Artificial Sequence
  Description of Artificial Sequence: Synthetic polypeptide
MNLLLILTFVAAAVAEVQLVESGGGLVQPGGSLRLSCAASGFTSDFYFIHWVRQAPGKGLEWVATIYPFIGNTYYADSVKGRFTISADTSKNTAYLQMNSLRAEDTAVYYCARAFPGSYHPFDYWGQGTLVTVSSASTKGPSVFPLAPSSKSTSGGTAALGCLVKDYFPEPVTVSWNSGALTSGVHTFPAVLQSSGLYSLSSVVTVPSSSLGTQTYICNVNHKPSNTKVDKKVEPKSCDKTHTCPPCPAPEAAGGPSVFLFPPKPKDTLMISRTPEVTCVVVDVSHEDPEVKFNWYVDGVEVHNAKTKPREEQYNSTYRVVSVLTVLHQDWLNGKEYKCKVSNKALPASIEKTISKAKGQPREPMVFDLPPSREEMTKNQVSLWCMVKGFYPSDIAVEWESNGQPENNYKTTPPVLDSDGSFFLYSKLTVDKSRWQQGNVFSCSVMHEALHNHYTQKSLSLSPGKGGGSGGGSGGGSGGGSGSTGEVQLVESGGGLVQPGGSLRLSCAASGFDFTAYAMHWVRQAPGKGLEWVASIYPSGGYTAYADSVKGRFTISADTSKNTAYLQMNSLRAEDTAVYYCARRSYYFALDYWGQGTLVTVSSGGGGSDIQMTQSPSSLSASVGDRVTITCRASQSVSSAVAWYQQKPGKAPKLLIYSASSLYSGVPSRFSGSRSGTDFTLTISSLQPEDFATYYCQQYWAYYSPITFGQGTKVEIK

SEQ ID NO: 963 - protein, 717 aa, Artificial Sequence
  Description of Artificial Sequence: Synthetic polypeptide
MNLLLILTFVAAAVAEVQLVESGGGLVQPGGSLRLSCAASGFTSDFYFIHWVRQAPGKGLEWVATIYPFIGNTYYADSVKGRFTISADTSKNTAYLQMNSLRAEDTAVYYCARAFPGSYHPFDYWGQGTLVTVSSASTKGPSVFPLAPSSKSTSGGTAALGCLVKDYFPEPVTVSWNSGALTSGVHTFPAVLQSSGLYSLSSVVTVPSSSLGTQTYICNVNHKPSNTKVDKKVEPKSCDKTHTCPPCPAPEAAGGPSVFLFPPKPKDTLMISRTPEVTCVVVDVSHEDPEVKFNWYVDGVEVHNAKTKPREEQYNSTYRVVSVLTVLHQDWLNGKEYKCKVSNKALPASIEKTISKAKGQPREPQVYTLPPSREEMTKNQVSLWCLVKGFYPSDIAVEWESNGQPENNYKTTPPVLDSDGSFFLYSKLTVDKSRWQQGNVFSCSVMHEALHNHYTQKSLSLSPGKGGGSGGGSGGGSGGGSGSTGEVQLVESGGGLVQPGGSLRLSCAASGFDFTAYAMHWVRQAPGKGLEWVASIYPSGGYTAYADSVKGRFTISADTSKNTAYLQMNSLRAEDTAVYYCARRSYYFALDYWGQGTLVTVSSGGGGSDIQMTQSPSSLSASVGDRVTITCRASQSVSSAVAWYQQKPGKAPKLLIYSASSLYSGVPSRFSGSRSGTDFTLTISSLQPEDFATYYCQQYWAYYSPITFGQGTKVEIK

SEQ ID NO: 964 - protein, 717 aa, Artificial Sequence
  Description of Artificial Sequence: Synthetic polypeptide
MNLLLILTFVAAAVAEVQLVESGGGLVQPGGSLRLSCAASGFTSDFYFIHWVRQAPGKGLEWVATIYPFIGNTYYADSVKGRFTISADTSKNTAYLQMNSLRAEDTAVYYCARAFPGSYHPFDYWGQGTLVTVSSASTKGPSVFPLAPSSKSTSGGTAALGCLVKDYFPEPVTVSWNSGALTSGVHTFPAVLQSSGLYSLSSVVTVPSSSLGTQTYICNVNHKPSNTKVDKKVEPKSCDKTHTCPPCPAPEAAGGPSVFLFPPKPKDTLMISRTPEVTCVVVDVSHEDPEVKFNWYVDGVEVHNAKTKPREEQYNSTYRVVSVLTVLHQDWLNGKEYKCKVSNKALPASIEKTISKAKGQPREPQVYTLPPCREEMTKNQVSLWCLVKGFYPSDIAVEWESNGQPENNYKTTPPVLDSDGSFFLYSKLTVDKSRWQQGNVFSCSVMHEALHNHYTQKSLSLSPGKGGGSGGGSGGGSGGGSGSTGEVQLVESGGGLVQPGGSLRLSCAASGFDFTAYAMHWVRQAPGKGLEWVASIYPSGGYTAYADSVKGRFTISADTSKNTAYLQMNSLRAEDTAVYYCARRSYYFALDYWGQGTLVTVSSGGGGSDIQMTQSPSSLSASVGDRVTITCRASQSVSSAVAWYQQKPGKAPKLLIYSASSLYSGVPSRFSGSRSGTDFTLTISSLQPEDFATYYCQQYWAYYSPITFGQGTKVEIK

SEQ ID NO: 965 - protein, 702 aa, Artificial Sequence
  Description of Artificial Sequence: Synthetic polypeptide
EVQLVESGGGLVQPGGSLRLSCAASGFTSDFYFIHWVRQAPGKGLEWVATIYPFIGNTYYADSVKGRFTISADTSKNTAYLQMNSLRAEDTAVYYCARAFPGSYHPFDYWGQGTLVTVSSASTKGPSVFPLAPSSKSTSGGTAALGCLVKDYFPEPVTVSWNSGALTSGVHTFPAVLQSSGLYSLSSVVTVPSSSLGTQTYICNVNHKPSNTKVDKKVEPKSCDKTHTCPPCPAPELLGGPSVFLFPPKPKDTLMISRTPEVTCVVVAVSHEDPEVKFNWYVDGVEVHNAKTKPREEQYGSTYRVVSVLTVLHQDWLNGKEYKCKVSNKALPAPIEKTISKAKGQPREPMVFDLPPSREEMTKNQVSLWCMVKGFYPSDIAVEWESNGQPENNYKTTPPVLDSDGSFFLYSKLTVDKSRWQQGNVFSCSVMHEALHNHYTQKSLSLSPGKGGGSGGGSGGGSGGGSGSTGEVQLVESGGGLVQPGGSLRLSCAASGFDFTAYAMHWVRQAPGKGLEWVASIYPSGGYTAYADSVKGRFTISADTSKNTAYLQMNSLRAEDTAVYYCARRSYYFALDYWGQGTLVTVSSGGGGSDIQMTQSPSSLSASVGDRVTITCRASQSVSSAVAWYQQKPGKAPKLLIYSASSLYSGVPSRFSGSRSGTDFTLTISSLQPEDFATYYCQQYWAYYSPITFGQGTKVEIK

SEQ ID NO: 966 - protein, 702 aa, Artificial Sequence
  Description of Artificial Sequence: Synthetic polypeptide
EVQLVESGGGLVQPGGSLRLSCAASGFTSDFYFIHWVRQAPGKGLEWVATIYPFIGNTYYADSVKGRFTISADTSKNTAYLQMNSLRAEDTAVYYCARAFPGSYHPFDYWGQGTLVTVSSASTKGPSVFPLAPSSKSTSGGTAALGCLVKDYFPEPVTVSWNSGALTSGVHTFPAVLQSSGLYSLSSVVTVPSSSLGTQTYICNVNHKPSNTKVDKKVEPKSCDKTHTCPPCPAPEAAGGPSVFLFPPKPKDTLMISRTPEVTCVVVDVSHEDPEVKFNWYVDGVEVHNAKTKPREEQYNSTYRVVSVLTVLHQDWLNGKEYKCKVSNKALPASIEKTISKAKGQPREPMVFDLPPSREEMTKNQVSLWCMVKGFYPSDIAVEWESNGQPENNYKTTPPVLDSDGSFFLYSKLTVDKSRWQQGNVFSCSVMHEALHNHYTQKSLSLSPGKGGGSGGGSGGGSGGGSGSTGEVQLVESGGGLVQPGGSLRLSCAASGFDFTAYAMHWVRQAPGKGLEWVASIYPSGGYTAYADSVKGRFTISADTSKNTAYLQMNSLRAEDTAVYYCARRSYYFALDYWGQGTLVTVSSGGGGSDIQMTQSPSSLSASVGDRVTITCRASQSVSSAVAWYQQKPGKAPKLLIYSASSLYSGVPSRFSGSRSGTDFTLTISSLQPEDFATYYCQQYWAYYSPITFGQGTKVEIK

SEQ ID NO: 967 - protein, 702 aa, Artificial Sequence
  Description of Artificial Sequence: Synthetic polypeptide
EVQLVESGGGLVQPGGSLRLSCAASGFTSDFYFIHWVRQAPGKGLEWVATIYPFIGNTYYADSVKGRFTISADTSKNTAYLQMNSLRAEDTAVYYCARAFPGSYHPFDYWGQGTLVTVSSASTKGPSVFPLAPSSKSTSGGTAALGCLVKDYFPEPVTVSWNSGALTSGVHTFPAVLQSSGLYSLSSVVTVPSSSLGTQTYICNVNHKPSNTKVDKKVEPKSCDKTHTCPPCPAPEAAGGPSVFLFPPKPKDTLMISRTPEVTCVVVDVSHEDPEVKFNWYVDGVEVHNAKTKPREEQYNSTYRVVSVLTVLHQDWLNGKEYKCKVSNKALPASIEKTISKAKGQPREPQVYTLPPSREEMTKNQVSLWCLVKGFYPSDIAVEWESNGQPENNYKTTPPVLDSDGSFFLYSKLTVDKSRWQQGNVFSCSVMHEALHNHYTQKSLSLSPGKGGGSGGGSGGGSGGGSGSTGEVQLVESGGGLVQPGGSLRLSCAASGFDFTAYAMHWVRQAPGKGLEWVASIYPSGGYTAYADSVKGRFTISADTSKNTAYLQMNSLRAEDTAVYYCARRSYYFALDYWGQGTLVTVSSGGGGSDIQMTQSPSSLSASVGDRVTITCRASQSVSSAVAWYQQKPGKAPKLLIYSASSLYSGVPSRFSGSRSGTDFTLTISSLQPEDFATYYCQQYWAYYSPITFGQGTKVEIK

SEQ ID NO: 968 - protein, 702 aa, Artificial Sequence
  Description of Artificial Sequence: Synthetic polypeptide
EVQLVESGGGLVQPGGSLRLSCAASGFTSDFYFIHWVRQAPGKGLEWVATIYPFIGNTYYADSVKGRFTISADTSKNTAYLQMNSLRAEDTAVYYCARAFPGSYHPFDYWGQGTLVTVSSASTKGPSVFPLAPSSKSTSGGTAALGCLVKDYFPEPVTVSWNSGALTSGVHTFPAVLQSSGLYSLSSVVTVPSSSLGTQTYICNVNHKPSNTKVDKKVEPKSCDKTHTCPPCPAPEAAGGPSVFLFPPKPKDTLMISRTPEVTCVVVDVSHEDPEVKFNWYVDGVEVHNAKTKPREEQYNSTYRVVSVLTVLHQDWLNGKEYKCKVSNKALPASIEKTISKAKGQPREPQVYTLPPCREEMTKNQVSLWCLVKGFYPSDIAVEWESNGQPENNYKTTPPVLDSDGSFFLYSKLTVDKSRWQQGNVFSCSVMHEALHNHYTQKSLSLSPGKGGGSGGGSGGGSGGGSGSTGEVQLVESGGGLVQPGGSLRLSCAASGFDFTAYAMHWVRQAPGKGLEWVASIYPSGGYTAYADSVKGRFTISADTSKNTAYLQMNSLRAEDTAVYYCARRSYYFALDYWGQGTLVTVSSGGGGSDIQMTQSPSSLSASVGDRVTITCRASQSVSSAVAWYQQKPGKAPKLLIYSASSLYSGVPSRFSGSRSGTDFTLTISSLQPEDFATYYCQQYWAYYSPITFGQGTKVEIK

SEQ ID NO: 969 - protein, 733 aa, Artificial Sequence
  Description of Artificial Sequence: Synthetic polypeptide
MNLLLILTFVAAAVAEVQLVESGGGLVQPGGSLRLSCAASGFDFSSSSIHWVRQAPGKGLEWVASISSSYGYTYYADSVKGRFTISADTSKNTAYLQMNSLRAEDTAVYYCARSWAMDYWGQGTLVTVSSGGGGSDIQMTQSPSSLSASVGDRVTITCRASQSVSSAVAWYQQKPGKAPKLLIYSASDLYSGVPSRFSGSRSGTDFTLTISSLQPEDFATYYCQQYAGAGLITFGQGTKVEIKGGGGSGGGGSEPKSSDKTHTCPPCPAPEAAGGPSVFLFPPKPKDTLMISRTPEVTCVVVDVSHEDPEVKFNWYVDGVEVHNAKTKPREEQYNSTYRVVSVLTVLHQDWLNGKEYKCKVSNKALPASIEKTISKAKGQPREPQVYTLPPIRELMTSNQVSLSCAVKGFYPSDIAVEWESNGQPENNYKTTPPVLDSDGSFFLVSKLTVDKSRWQQGNVFSCSVMHEALHNHYTQKSLSLSPGKGGGSGGGSGGGSGGGSGSTGEVQLVESGGGLVQPGGSLRLSCAASGFTSDFYFIHWVRQAPGKGLEWVATIYPFIGNTYYADSVKGRFTISADTSKNTAYLQMNSLRAEDTAVYYCARAFPGSYHPFDYWGQGTLVTVSSASTKGPSVFPLAPSSKSTSGGTAALGCLVKDYFPEPVTVSWNSGALTSGVHTFPAVLQSSGLYSLSSVVTVPSSSLGTQTYICNVNHKPSNTKVDKKVEPKSCDKTHT

SEQ ID NO: 970 - protein, 733 aa, Artificial Sequence
  Description of Artificial Sequence: Synthetic polypeptide
MNLLLILTFVAAAVAEVQLVESGGGLVQPGGSLRLSCAASGFDFSSSSIHWVRQAPGKGLEWVASISSSYGYTYYADSVKGRFTISADTSKNTAYLQMNSLRAEDTAVYYCARSWAMDYWGQGTLVTVSSGGGGSDIQMTQSPSSLSASVGDRVTITCRASQSVSSAVAWYQQKPGKAPKLLIYSASDLYSGVPSRFSGSRSGTDFTLTISSLQPEDFATYYCQQYAGAGLITFGQGTKVEIKGGGGSGGGGSEPKSSDKTHTCPPCPAPEAAGGPSVFLFPPKPKDTLMISRTPEVTCVVVDVSHEDPEVKFNWYVDGVEVHNAKTKPREEQYNSTYRVVSVLTVLHQDWLNGKEYKCKVSNKALPASIEKTISKAKGQPREPQVYTLPPSREEMTKNQVSLSCAVKGFYPSDIAVEWESNGQPENNYKTTPPVLDSDGSFFLVSKLTVDKSRWQQGNVFSCSVMHEALHNHYTQKSLSLSPGKGGGSGGGSGGGSGGGSGSTGEVQLVESGGGLVQPGGSLRLSCAASGFTSDFYFIHWVRQAPGKGLEWVATIYPFIGNTYYADSVKGRFTISADTSKNTAYLQMNSLRAEDTAVYYCARAFPGSYHPFDYWGQGTLVTVSSASTKGPSVFPLAPSSKSTSGGTAALGCLVKDYFPEPVTVSWNSGALTSGVHTFPAVLQSSGLYSLSSVVTVPSSSLGTQTYICNVNHKPSNTKVDKKVEPKSCDKTHT

SEQ ID NO: 971 - protein, 733 aa, Artificial Sequence
  Description of Artificial Sequence: Synthetic polypeptide
MNLLLILTFVAAAVAEVQLVESGGGLVQPGGSLRLSCAASGFDFSSSSIHWVRQAPGKGLEWVASISSSYGYTYYADSVKGRFTISADTSKNTAYLQMNSLRAEDTAVYYCARSWAMDYWGQGTLVTVSSGGGGSDIQMTQSPSSLSASVGDRVTITCRASQSVSSAVAWYQQKPGKAPKLLIYSASDLYSGVPSRFSGSRSGTDFTLTISSLQPEDFATYYCQQYAGAGLITFGQGTKVEIKGGGGSGGGGSEPKSSDKTHTCPPCPAPEAAGGPSVFLFPPKPKDTLMISRTPEVTCVVVDVSHEDPEVKFNWYVDGVEVHNAKTKPREEQYNSTYRVVSVLTVLHQDWLNGKEYKCKVSNKALPASIEKTISKAKGQPREPQVCTLPPSREEMTKNQVSLSCAVKGFYPSDIAVEWESNGQPENNYKTTPPVLDSDGSFFLVSKLTVDKSRWQQGNVFSCSVMHEALHNHYTQKSLSLSPGKGGGSGGGSGGGSGGGSGSTGEVQLVESGGGLVQPGGSLRLSCAASGFTSDFYFIHWVRQAPGKGLEWVATIYPFIGNTYYADSVKGRFTISADTSKNTAYLQMNSLRAEDTAVYYCARAFPGSYHPFDYWGQGTLVTVSSASTKGPSVFPLAPSSKSTSGGTAALGCLVKDYFPEPVTVSWNSGALTSGVHTFPAVLQSSGLYSLSSVVTVPSSSLGTQTYICNVNHKPSNTKVDKKVEPKSCDKTHT

SEQ ID NO: 972 - protein, 718 aa, Artificial Sequence
  Description of Artificial Sequence: Synthetic polypeptide
EVQLVESGGGLVQPGGSLRLSCAASGFDFSSSSIHWVRQAPGKGLEWVASISSSYGYTYYADSVKGRFTISADTSKNTAYLQMNSLRAEDTAVYYCARSWAMDYWGQGTLVTVSSGGGGSDIQMTQSPSSLSASVGDRVTITCRASQSVSSAVAWYQQKPGKAPKLLIYSASDLYSGVPSRFSGSRSGTDFTLTISSLQPEDFATYYCQQYAGAGLITFGQGTKVEIKGGGGSGGGGSEPKSSDKTHTCPPCPAPELLGGPSVFLFPPKPKDTLMISRTPEVTCVVVAVSHEDPEVKFNWYVDGVEVHNAKTKPREEQYGSTYRVVSVLTVLHQDWLNGKEYKCKVSNKALPAPIEKTISKAKGQPREPQVYTLPPIRELMTSNQVSLSCAVKGFYPSDIAVEWESNGQPENNYKTTPPVLDSDGSFFLVSKLTVDKSRWQQGNVFSCSVMHEALHNHYTQKSLSLSPGKGGGSGGGSGGGSGGGSGSTGEVQLVESGGGLVQPGGSLRLSCAASGFTSDFYFIHWVRQAPGKGLEWVATIYPFIGNTYYADSVKGRFTISADTSKNTAYLQMNSLRAEDTAVYYCARAFPGSYHPFDYWGQGTLVTVSSASTKGPSVFPLAPSSKSTSGGTAALGCLVKDYFPEPVTVSWNSGALTSGVHTFPAVLQSSGLYSLSSVVTVPSSSLGTQTYICNVNHKPSNTKVDKKVEPKSCDKTHT

SEQ ID NO: 973 - protein, 718 aa, Artificial Sequence
  Description of Artificial Sequence: Synthetic polypeptide
EVQLVESGGGLVQPGGSLRLSCAASGFDFSSSSIHWVRQAPGKGLEWVASISSSYGYTYYADSVKGRFTISADTSKNTAYLQMNSLRAEDTAVYYCARSWAMDYWGQGTLVTVSSGGGGSDIQMTQSPSSLSASVGDRVTITCRASQSVSSAVAWYQQKPGKAPKLLIYSASDLYSGVPSRFSGSRSGTDFTLTISSLQPEDFATYYCQQYAGAGLITFGQGTKVEIKGGGGSGGGGSEPKSSDKTHTCPPCPAPEAAGGPSVFLFPPKPKDTLMISRTPEVTCVVVDVSHEDPEVKFNWYVDGVEVHNAKTKPREEQYNSTYRVVSVLTVLHQDWLNGKEYKCKVSNKALPASIEKTISKAKGQPREPQVYTLPPIRELMTSNQVSLSCAVKGFYPSDIAVEWESNGQPENNYKTTPPVLDSDGSFFLVSKLTVDKSRWQQGNVFSCSVMHEALHNHYTQKSLSLSPGKGGGSGGGSGGGSGGGSGSTGEVQLVESGGGLVQPGGSLRLSCAASGFTSDFYFIHWVRQAPGKGLEWVATIYPFIGNTYYADSVKGRFTISADTSKNTAYLQMNSLRAEDTAVYYCARAFPGSYHPFDYWGQGTLVTVSSASTKGPSVFPLAPSSKSTSGGTAALGCLVKDYFPEPVTVSWNSGALTSGVHTFPAVLQSSGLYSLSSVVTVPSSSLGTQTYICNVNHKPSNTKVDKKVEPKSCDKTHT

SEQ ID NO: 974 - protein, 718 aa, Artificial Sequence
  Description of Artificial Sequence: Synthetic polypeptide
EVQLVESGGGLVQPGGSLRLSCAASGFDFSSSSIHWVRQAPGKGLEWVASISSSYGYTYYADSVKGRFTISADTSKNTAYLQMNSLRAEDTAVYYCARSWAMDYWGQGTLVTVSSGGGGSDIQMTQSPSSLSASVGDRVTITCRASQSVSSAVAWYQQKPGKAPKLLIYSASDLYSGVPSRFSGSRSGTDFTLTISSLQPEDFATYYCQQYAGAGLITFGQGTKVEIKGGGGSGGGGSEPKSSDKTHTCPPCPAPEAAGGPSVFLFPPKPKDTLMISRTPEVTCVVVDVSHEDPEVKFNWYVDGVEVHNAKTKPREEQYNSTYRVVSVLTVLHQDWLNGKEYKCKVSNKALPASIEKTISKAKGQPREPQVYTLPPSREEMTKNQVSLSCAVKGFYPSDIAVEWESNGQPENNYKTTPPVLDSDGSFFLVSKLTVDKSRWQQGNVFSCSVMHEALHNHYTQKSLSLSPGKGGGSGGGSGGGSGGGSGSTGEVQLVESGGGLVQPGGSLRLSCAASGFTSDFYFIHWVRQAPGKGLEWVATIYPFIGNTYYADSVKGRFTISADTSKNTAYLQMNSLRAEDTAVYYCARAFPGSYHPFDYWGQGTLVTVSSASTKGPSVFPLAPSSKSTSGGTAALGCLVKDYFPEPVTVSWNSGALTSGVHTFPAVLQSSGLYSLSSVVTVPSSSLGTQTYICNVNHKPSNTKVDKKVEPKSCDKTHT

SEQ ID NO: 975 - protein, 718 aa, Artificial Sequence
  Description of Artificial Sequence: Synthetic polypeptide
EVQLVESGGGLVQPGGSLRLSCAASGFDFSSSSIHWVRQAPGKGLEWVASISSSYGYTYYADSVKGRFTISADTSKNTAYLQMNSLRAEDTAVYYCARSWAMDYWGQGTLVTVSSGGGGSDIQMTQSPSSLSASVGDRVTITCRASQSVSSAVAWYQQKPGKAPKLLIYSASDLYSGVPSRFSGSRSGTDFTLTISSLQPEDFATYYCQQYAGAGLITFGQGTKVEIKGGGGSGGGGSEPKSSDKTHTCPPCPAPEAAGGPSVFLFPPKPKDTLMISRTPEVTCVVVDVSHEDPEVKFNWYVDGVEVHNAKTKPREEQYNSTYRVVSVLTVLHQDWLNGKEYKCKVSNKALPASIEKTISKAKGQPREPQVCTLPPSREEMTKNQVSLSCAVKGFYPSDIAVEWESNGQPENNYKTTPPVLDSDGSFFLVSKLTVDKSRWQQGNVFSCSVMHEALHNHYTQKSLSLSPGKGGGSGGGSGGGSGGGSGSTGEVQLVESGGGLVQPGGSLRLSCAASGFTSDFYFIHWVRQAPGKGLEWVATIYPFIGNTYYADSVKGRFTISADTSKNTAYLQMNSLRAEDTAVYYCARAFPGSYHPFDYWGQGTLVTVSSASTKGPSVFPLAPSSKSTSGGTAALGCLVKDYFPEPVTVSWNSGALTSGVHTFPAVLQSSGLYSLSSVVTVPSSSLGTQTYICNVNHKPSNTKVDKKVEPKSCDKTHT

SEQ ID NO: 976 - protein, 737 aa, Artificial Sequence
  Description of Artificial Sequence: Synthetic polypeptide
MNLLLILTFVAAAVAEVQLVESGGGLVQPGGSLRLSCAASGFDFTAYAMHWVRQAPGKGLEWVASIYPSGGYTAYADSVKGRFTISADTSKNTAYLQMNSLRAEDTAVYYCARRSYYFALDYWGQGTLVTVSSGGGGSDIQMTQSPSSLSASVGDRVTITCRASQSVSSAVAWYQQKPGKAPKLLIYSASSLYSGVPSRFSGSRSGTDFTLTISSLQPEDFATYYCQQYWAYYSPITFGQGTKVEIKGGGGSGGGGSEPKSSDKTHTCPPCPAPELLGGPSVFLFPPKPKDTLMISRTPEVTCVVVAVSHEDPEVKFNWYVDGVEVHNAKTKPREEQYGSTYRVVSVLTVLHQDWLNGKEYKCKVSNKALPAPIEKTISKAKGQPREPMVFDLPPSREEMTKNQVSLWCMVKGFYPSDIAVEWESNGQPENNYKTTPPVLDSDGSFFLYSKLTVDKSRWQQGNVFSCSVMHEALHNHYTQKSLSLSPGKGGGSGGGSGGGSGGGSGSTGEVQLVESGGGLVQPGGSLRLSCAASGFTSDFYFIHWVRQAPGKGLEWVATIYPFIGNTYYADSVKGRFTISADTSKNTAYLQMNSLRAEDTAVYYCARAFPGSYHPFDYWGQGTLVTVSSASTKGPSVFPLAPSSKSTSGGTAALGCLVKDYFPEPVTVSWNSGALTSGVHTFPAVLQSSGLYSLSSVVTVPSSSLGTQTYICNVNHKPSNTKVDKKVEPKSCDKTHT

SEQ ID NO: 977 - protein, 737 aa, Artificial Sequence
  Description of Artificial Sequence: Synthetic polypeptide
MNLLLILTFVAAAVAEVQLVESGGGLVQPGGSLRLSCAASGFDFTAYAMHWVRQAPGKGLEWVASIYPSGGYTAYADSVKGRFTISADTSKNTAYLQMNSLRAEDTAVYYCARRSYYFALDYWGQGTLVTVSSGGGGSDIQMTQSPSSLSASVGDRVTITCRASQSVSSAVAWYQQKPGKAPKLLIYSASSLYSGVPSRFSGSRSGTDFTLTISSLQPEDFATYYCQQYWAYYSPITFGQGTKVEIKGGGGSGGGGSEPKSSDKTHTCPPCPAPEAAGGPSVFLFPPKPKDTLMISRTPEVTCVVVDVSHEDPEVKFNWYVDGVEVHNAKTKPREEQYNSTYRVVSVLTVLHQDWLNGKEYKCKVSNKALPASIEKTISKAKGQPREPMVFDLPPSREEMTKNQVSLWCMVKGFYPSDIAVEWESNGQPENNYKTTPPVLDSDGSFFLYSKLTVDKSRWQQGNVFSCSVMHEALHNHYTQKSLSLSPGKGGGSGGGSGGGSGGGSGSTGEVQLVESGGGLVQPGGSLRLSCAASGFTSDFYFIHWVRQAPGKGLEWVATIYPFIGNTYYADSVKGRFTISADTSKNTAYLQMNSLRAEDTAVYYCARAFPGSYHPFDYWGQGTLVTVSSASTKGPSVFPLAPSSKSTSGGTAALGCLVKDYFPEPVTVSWNSGALTSGVHTFPAVLQSSGLYSLSSVVTVPSSSLGTQTYICNVNHKPSNTKVDKKVEPKSCDKTHT

SEQ ID NO: 978 - protein, 737 aa, Artificial Sequence
  Description of Artificial Sequence: Synthetic polypeptide
MNLLLILTFVAAAVAEVQLVESGGGLVQPGGSLRLSCAASGFDFTAYAMHWVRQAPGKGLEWVASIYPSGGYTAYADSVKGRFTISADTSKNTAYLQMNSLRAEDTAVYYCARRSYYFALDYWGQGTLVTVSSGGGGSDIQMTQSPSSLSASVGDRVTITCRASQSVSSAVAWYQQKPGKAPKLLIYSASSLYSGVPSRFSGSRSGTDFTLTISSLQPEDFATYYCQQYWAYYSPITFGQGTKVEIKGGGGSGGGGSEPKSSDKTHTCPPCPAPEAAGGPSVFLFPPKPKDTLMISRTPEVTCVVVDVSHEDPEVKFNWYVDGVEVHNAKTKPREEQYNSTYRVVSVLTVLHQDWLNGKEYKCKVSNKALPASIEKTISKAKGQPREPQVYTLPPSREEMTKNQVSLWCLVKGFYPSDIAVEWESNGQPENNYKTTPPVLDSDGSFFLYSKLTVDKSRWQQGNVFSCSVMHEALHNHYTQKSLSLSPGKGGGSGGGSGGGSGGGSGSTGEVQLVESGGGLVQPGGSLRLSCAASGFTSDFYFIHWVRQAPGKGLEWVATIYPFIGNTYYADSVKGRFTISADTSKNTAYLQMNSLRAEDTAVYYCARAFPGSYHPFDYWGQGTLVTVSSASTKGPSVFPLAPSSKSTSGGTAALGCLVKDYFPEPVTVSWNSGALTSGVHTFPAVLQSSGLYSLSSVVTVPSSSLGTQTYICNVNHKPSNTKVDKKVEPKSCDKTHT

SEQ ID NO: 979 - protein, 737 aa, Artificial Sequence
  Description of Artificial Sequence: Synthetic polypeptide
MNLLLILTFVAAAVAEVQLVESGGGLVQPGGSLRLSCAASGFDFTAYAMHWVRQAPGKGLEWVASIYPSGGYTAYADSVKGRFTISADTSKNTAYLQMNSLRAEDTAVYYCARRSYYFALDYWGQGTLVTVSSGGGGSDIQMTQSPSSLSASVGDRVTITCRASQSVSSAVAWYQQKPGKAPKLLIYSASSLYSGVPSRFSGSRSGTDFTLTISSLQPEDFATYYCQQYWAYYSPITFGQGTKVEIKGGGGSGGGGSEPKSSDKTHTCPPCPAPEAAGGPSVFLFPPKPKDTLMISRTPEVTCVVVDVSHEDPEVKFNWYVDGVEVHNAKTKPREEQYNSTYRVVSVLTVLHQDWLNGKEYKCKVSNKALPASIEKTISKAKGQPREPQVYTLPPCREEMTKNQVSLWCLVKGFYPSDIAVEWESNGQPENNYKTTPPVLDSDGSFFLYSKLTVDKSRWQQGNVFSCSVMHEALHNHYTQKSLSLSPGKGGGSGGGSGGGSGGGSGSTGEVQLVESGGGLVQPGGSLRLSCAASGFTSDFYFIHWVRQAPGKGLEWVATIYPFIGNTYYADSVKGRFTISADTSKNTAYLQMNSLRAEDTAVYYCARAFPGSYHPFDYWGQGTLVTVSSASTKGPSVFPLAPSSKSTSGGTAALGCLVKDYFPEPVTVSWNSGALTSGVHTFPAVLQSSGLYSLSSVVTVPSSSLGTQTYICNVNHKPSNTKVDKKVEPKSCDKTHT

SEQ ID NO: 980 - protein, 722 aa, Artificial Sequence
  Description of Artificial Sequence: Synthetic polypeptide
EVQLVESGGGLVQPGGSLRLSCAASGFDFTAYAMHWVRQAPGKGLEWVASIYPSGGYTAYADSVKGRFTISADTSKNTAYLQMNSLRAEDTAVYYCARRSYYFALDYWGQGTLVTVSSGGGGSDIQMTQSPSSLSASVGDRVTITCRASQSVSSAVAWYQQKPGKAPKLLIYSASSLYSGVPSRFSGSRSGTDFTLTISSLQPEDFATYYCQQYWAYYSPITFGQGTKVEIKGGGGSGGGGSEPKSSDKTHTCPPCPAPELLGGPSVFLFPPKPKDTLMISRTPEVTCVVVAVSHEDPEVKFNWYVDGVEVHNAKTKPREEQYGSTYRVVSVLTVLHQDWLNGKEYKCKVSNKALPAPIEKTISKAKGQPREPMVFDLPPSREEMTKNQVSLWCMVKGFYPSDIAVEWESNGQPENNYKTTPPVLDSDGSFFLYSKLTVDKSRWQQGNVFSCSVMHEALHNHYTQKSLSLSPGKGGGSGGGSGGGSGGGSGSTGEVQLVESGGGLVQPGGSLRLSCAASGFTSDFYFIHWVRQAPGKGLEWVATIYPFIGNTYYADSVKGRFTISADTSKNTAYLQMNSLRAEDTAVYYCARAFPGSYHPFDYWGQGTLVTVSSASTKGPSVFPLAPSSKSTSGGTAALGCLVKDYFPEPVTVSWNSGALTSGVHTFPAVLQSSGLYSLSSVVTVPSSSLGTQTYICNVNHKPSNTKVDKKVEPKSCDKTHT

SEQ ID NO: 981 - protein, 722 aa, Artificial Sequence
  Description of Artificial Sequence: Synthetic polypeptide
EVQLVESGGGLVQPGGSLRLSCAASGFDFTAYAMHWVRQAPGKGLEWVASIYPSGGYTAYADSVKGRFTISADTSKNTAYLQMNSLRAEDTAVYYCARRSYYFALDYWGQGTLVTVSSGGGGSDIQMTQSPSSLSASVGDRVTITCRASQSVSSAVAWYQQKPGKAPKLLIYSASSLYSGVPSRFSGSRSGTDFTLTISSLQPEDFATYYCQQYWAYYSPITFGQGTKVEIKGGGGSGGGGSEPKSSDKTHTCPPCPAPEAAGGPSVFLFPPKPKDTLMISRTPEVTCVVVDVSHEDPEVKFNWYVDGVEVHNAKTKPREEQYNSTYRVVSVLTVLHQDWLNGKEYKCKVSNKALPASIEKTISKAKGQPREPMVFDLPPSREEMTKNQVSLWCMVKGFYPSDIAVEWESNGQPENNYKTTPPVLDSDGSFFLYSKLTVDKSRWQQGNVFSCSVMHEALHNHYTQKSLSLSPGKGGGSGGGSGGGSGGGSGSTGEVQLVESGGGLVQPGGSLRLSCAASGFTSDFYFIHWVRQAPGKGLEWVATIYPFIGNTYYADSVKGRFTISADTSKNTAYLQMNSLRAEDTAVYYCARAFPGSYHPFDYWGQGTLVTVSSASTKGPSVFPLAPSSKSTSGGTAALGCLVKDYFPEPVTVSWNSGALTSGVHTFPAVLQSSGLYSLSSVVTVPSSSLGTQTYICNVNHKPSNTKVDKKVEPKSCDKTHT

SEQ ID NO: 982 - protein, 722 aa, Artificial Sequence
  Description of Artificial Sequence: Synthetic polypeptide
EVQLVESGGGLVQPGGSLRLSCAASGFDFTAYAMHWVRQAPGKGLEWVASIYPSGGYTAYADSVKGRFTISADTSKNTAYLQMNSLRAEDTAVYYCARRSYYFALDYWGQGTLVTVSSGGGGSDIQMTQSPSSLSASVGDRVTITCRASQSVSSAVAWYQQKPGKAPKLLIYSASSLYSGVPSRFSGSRSGTDFTLTISSLQPEDFATYYCQQYWAYYSPITFGQGTKVEIKGGGGSGGGGSEPKSSDKTHTCPPCPAPEAAGGPSVFLFPPKPKDTLMISRTPEVTCVVVDVSHEDPEVKFNWYVDGVEVHNAKTKPREEQYNSTYRVVSVLTVLHQDWLNGKEYKCKVSNKALPASIEKTISKAKGQPREPQVYTLPPSREEMTKNQVSLWCLVKGFYPSDIAVEWESNGQPENNYKTTPPVLDSDGSFFLYSKLTVDKSRWQQGNVFSCSVMHEALHNHYTQKSLSLSPGKGGGSGGGSGGGSGGGSGSTGEVQLVESGGGLVQPGGSLRLSCAASGFTSDFYFIHWVRQAPGKGLEWVATIYPFIGNTYYADSVKGRFTISADTSKNTAYLQMNSLRAEDTAVYYCARAFPGSYHPFDYWGQGTLVTVSSASTKGPSVFPLAPSSKSTSGGTAALGCLVKDYFPEPVTVSWNSGALTSGVHTFPAVLQSSGLYSLSSVVTVPSSSLGTQTYICNVNHKPSNTKVDKKVEPKSCDKTHT

SEQ ID NO: 983 - protein, 722 aa, Artificial Sequence
  Description of Artificial Sequence: Synthetic polypeptide
EVQLVESGGGLVQPGGSLRLSCAASGFDFTAYAMHWVRQAPGKGLEWVASIYPSGGYTAYADSVKGRFTISADTSKNTAYLQMNSLRAEDTAVYYCARRSYYFALDYWGQGTLVTVSSGGGGSDIQMTQSPSSLSASVGDRVTITCRASQSVSSAVAWYQQKPGKAPKLLIYSASSLYSGVPSRFSGSRSGTDFTLTISSLQPEDFATYYCQQYWAYYSPITFGQGTKVEIKGGGGSGGGGSEPKSSDKTHTCPPCPAPEAAGGPSVFLFPPKPKDTLMISRTPEVTCVVVDVSHEDPEVKFNWYVDGVEVHNAKTKPREEQYNSTYRVVSVLTVLHQDWLNGKEYKCKVSNKALPASIEKTISKAKGQPREPQVYTLPPCREEMTKNQVSLWCLVKGFYPSDIAVEWESNGQPENNYKTTPPVLDSDGSFFLYSKLTVDKSRWQQGNVFSCSVMHEALHNHYTQKSLSLSPGKGGGSGGGSGGGSGGGSGSTGEVQLVESGGGLVQPGGSLRLSCAASGFTSDFYFIHWVRQAPGKGLEWVATIYPFIGNTYYADSVKGRFTISADTSKNTAYLQMNSLRAEDTAVYYCARAFPGSYHPFDYWGQGTLVTVSSASTKGPSVFPLAPSSKSTSGGTAALGCLVKDYFPEPVTVSWNSGALTSGVHTFPAVLQSSGLYSLSSVVTVPSSSLGTQTYICNVNHKPSNTKVDKKVEPKSCDKTHT

SEQ ID NO: 984 - protein, 214 aa, Artificial Sequence
  Description of Artificial Sequence: Synthetic polypeptide
DIQMTQSPSSLSASVGDRVTITCRASQSVSSAVAWYQQKPGKAPKLLIYSASSLYSGVPSRFSGSRSGTDFTLTISSLQPEDFATYYCQQSTGSLITFGQGTKVEIKRTVAAPSVFIFPPSDEQLKSGTASVVCLLNNFYPREAKVQWKVDNALQSGNSQESVTEQDSKDSTYSLSSTLTLSKADYEKHKVYACEVTHQGLSSPVTKSFNRGEC

SEQ ID NO: 985 - protein, 10 aa, Artificial Sequence
  Description of Artificial Sequence: Synthetic peptide
TVYPYLDYTY

SEQ ID NO: 986 - protein, 735 aa, Artificial Sequence
  Description of Artificial Sequence: Synthetic polypeptide
MNLLLILTFVAAAVAEVQLVESGGGLVQPGGSLRLSCAASGFTLSYSYIHWVRQAPGKGLEWVASIYSYTGATDYADSVKGRFTISADTSKNTAYLQMNSLRAEDTAVYYCARYWSTNRILSYGGMDYWGQGTLVTVSSGGGGSDIQMTQSPSSLSASVGDRVTITCRASQSVSSAVAWYQQKPGKAPKLLIYSASSLYSGVPSRFSGSRSGTDFTLTISSLQPEDFATYYCQQYFDPITFGQGTKVEIKGGGGSGGGGSEPKSSDKTHTCPPCPAPELLGGPSVFLFPPKPKDTLMISRTPEVTCVVVAVSHEDPEVKFNWYVDGVEVHNAKTKPREEQYGSTYRVVSVLTVLHQDWLNGKEYKCKVSNKALPAPIEKTISKAKGQPREPQVYTLPPIRELMTSNQVSLSCAVKGFYPSDIAVEWESNGQPENNYKTTPPVLDSDGSFFLVSKLTVDKSRWQQGNVFSCSVMHEALHNHYTQKSLSLSPGKGGGSGGGSGGGSGGGSGSTGEVQLVESGGGLVQPGGSLRLSCAASGFNIAYSSMHWVRQAPGKGLEWVATIYPSYSSTYYADSVKGRFTISADTSKNTAYLQMNSLRAEDTAVYYCARYYAMDYWGQGTLVTVSSASTKGPSVFPLAPSSKSTSGGTAALGCLVKDYFPEPVTVSWNSGALTSGVHTFPAVLQSSGLYSLSSVVTVPSSSLGTQTYICNVNHKPSNTKVDKKVEPKSCDKTHT

SEQ ID NO: 987 - protein, 733 aa, Artificial Sequence
  Description of Artificial Sequence: Synthetic polypeptide
MNLLLILTFVAAAVAEVQLVESGGGLVQPGGSLRLSCAASGFDLSHSSIHWVRQAPGKGLEWVASISSHYGYTHYADSVKGRFTISADTSKNTAYLQMNSLRAEDTAVYYCARSSYFPWFFALDYWGQGTLVTVSSGGGGSDIQMTQSPSSLSASVGDRVTITCRASQDVSTAVAWYQQKPGKAPKLLIYSASFLYSGVPSRFSGSRSGTDFTLTISSLQPEDFATYYCQQHYTTPPTFGQGTKVEIKGGGGSGGGGSEPKTSDKTHTCPPCPAPELLGGPSVFLFPPKPKDTLMISRTPEVTCVVVAVSHEDPEVKFNWYVDGVEVHNAKTKPREEQYGSTYRVVSVLTVLHQDWLNGKEYKCKVSNKALPAPIEKTISKAKGQPREPMVFDLPPSREEMTKNQVSLWCMVKGFYPSDIAVEWESNGQPENNYKTTPPVLDSDGSFFLYSKLTVDKSRWQQGNVFSCSVMHEALHNHYTQKSLSLSPGKGGGSGGGSGGGSGGGSGSTGEVQLVESGGGLVQPGGSLRLSCAASGFNIAYSSMHWVRQAPGKGLEWVATIYPSYSSTYYADSVKGRFTISADTSKNTAYLQMNSLRAEDTAVYYCARYYAMDYWGQGTLVTVSSASTKGPSVFPLAPSSKSTSGGTAALGCLVKDYFPEPVTVSWNSGALTSGVHTFPAVLQSSGLYSLSSVVTVPSSSLGTQTYICNVNHKPSNTKVDKKVEPKSCDKTHT

SEQ ID NO: 988 - protein, 735 aa, Artificial Sequence
  Description of Artificial Sequence: Synthetic polypeptide
MNLLLILTFVAAAVAEVQLVESGGGLVQPGGSLRLSCAASGFTLSYSYIHWVRQAPGKGLEWVASIYSYTGATDYADSVKGRFTISADTSKNTAYLQMNSLRAEDTAVYYCARYWSTNRILSYGGMDYWGQGTLVTVSSGGGGSDIQMTQSPSSLSASVGDRVTITCRASQSVSSAVAWYQQKPGKAPKLLIYSASSLYSGVPSRFSGSRSGTDFTLTISSLQPEDFATYYCQQYFDPITFGQGTKVEIKGGGGSGGGGSEPKSSDKTHTCPPCPAPELLGGPSVFLFPPKPKDTLMISRTPEVTCVVVAVSHEDPEVKFNWYVDGVEVHNAKTKPREEQYGSTYRVVSVLTVLHQDWLNGKEYKCKVSNKALPAPIEKTISKAKGQPREPQVYTLPPIRELMTSNQVSLSCAVKGFYPSDIAVEWESNGQPENNYKTTPPVLDSDGSFFLVSKLTVDKSRWQQGNVFSCSVMHEALHNHYTQKSLSLSPGKGGGSGGGSGGGSGGGSGSTGEVQLVESGGGLVQPGGSLRLSCAASGFNIAYSSMHWVRQAPGKGLEWVATIYPSYSSTYYADSVKGRFTISADTSKNTAYLQMNSLRAEDTAVYYCARDYAMDYWGQGTLVTVSSASTKGPSVFPLAPSSKSTSGGTAALGCLVKDYFPEPVTVSWNSGALTSGVHTFPAVLQSSGLYSLSSVVTVPSSSLGTQTYICNVNHKPSNTKVDKKVEPKSCDKTHT

SEQ ID NO: 989 - protein, 733 aa, Artificial Sequence
  Description of Artificial Sequence: Synthetic polypeptide
MNLLLILTFVAAAVAEVQLVESGGGLVQPGGSLRLSCAASGFDLSHSSIHWVRQAPGKGLEWVASISSHYGYTHYADSVKGRFTISADTSKNTAYLQMNSLRAEDTAVYYCARSSYFPWFFALDYWGQGTLVTVSSGGGGSDIQMTQSPSSLSASVGDRVTITCRASQDVSTAVAWYQQKPGKAPKLLIYSASFLYSGVPSRFSGSRSGTDFTLTISSLQPEDFATYYCQQHYTTPPTFGQGTKVEIKGGGGSGGGGSEPKTSDKTHTCPPCPAPELLGGPSVFLFPPKPKDTLMISRTPEVTCVVVAVSHEDPEVKFNWYVDGVEVHNAKTKPREEQYGSTYRVVSVLTVLHQDWLNGKEYKCKVSNKALPAPIEKTISKAKGQPREPMVFDLPPSREEMTKNQVSLWCMVKGFYPSDIAVEWESNGQPENNYKTTPPVLDSDGSFFLYSKLTVDKSRWQQGNVFSCSVMHEALHNHYTQKSLSLSPGKGGGSGGGSGGGSGGGSGSTGEVQLVESGGGLVQPGGSLRLSCAASGFNIAYSSMHWVRQAPGKGLEWVATIYPSYSSTYYADSVKGRFTISADTSKNTAYLQMNSLRAEDTAVYYCARDYAMDYWGQGTLVTVSSASTKGPSVFPLAPSSKSTSGGTAALGCLVKDYFPEPVTVSWNSGALTSGVHTFPAVLQSSGLYSLSSVVTVPSSSLGTQTYICNVNHKPSNTKVDKKVEPKSCDKTHT

SEQ ID NO: 990 - protein, 735 aa, Artificial Sequence
  Description of Artificial Sequence: Synthetic polypeptide
MNLLLILTFVAAAVAEVQLVESGGGLVQPGGSLRLSCAASGFTLSYSYIHWVRQAPGKGLEWVASIYSYTGATDYADSVKGRFTISADTSKNTAYLQMNSLRAEDTAVYYCARYWSTNRILSYGGMDYWGQGTLVTVSSGGGGSDIQMTQSPSSLSASVGDRVTITCRASQSVSSAVAWYQQKPGKAPKLLIYSASSLYSGVPSRFSGSRSGTDFTLTISSLQPEDFATYYCQQYFDPITFGQGTKVEIKGGGGSGGGGSEPKSSDKTHTCPPCPAPELLGGPSVFLFPPKPKDTLMISRTPEVTCVVVAVSHEDPEVKFNWYVDGVEVHNAKTKPREEQYGSTYRVVSVLTVLHQDWLNGKEYKCKVSNKALPAPIEKTISKAKGQPREPQVYTLPPIRELMTSNQVSLSCAVKGFYPSDIAVEWESNGQPENNYKTTPPVLDSDGSFFLVSKLTVDKSRWQQGNVFSCSVMHEALHNHYTQKSLSLSPGKGGGSGGGSGGGSGGGSGSTGEVQLVESGGGLVQPGGSLRLSCAASGFNIAYSSMHWVRQAPGKGLEWVATIYPSYSSTYYADSVKGRFTISADTSKNTAYLQMNSLRAEDTAVYYCARYYDMDYWGQGTLVTVSSASTKGPSVFPLAPSSKSTSGGTAALGCLVKDYFPEPVTVSWNSGALTSGVHTFPAVLQSSGLYSLSSVVTVPSSSLGTQTYICNVNHKPSNTKVDKKVEPKSCDKTHT

SEQ ID NO: 991 - protein, 733 aa, Artificial Sequence
  Description of Artificial Sequence: Synthetic polypeptide
MNLLLILTFVAAAVAEVQLVESGGGLVQPGGSLRLSCAASGFDLSHSSIHWVRQAPGKGLEWVASISSHYGYTHYADSVKGRFTISADTSKNTAYLQMNSLRAEDTAVYYCARSSYFPWFFALDYWGQGTLVTVSSGGGGSDIQMTQSPSSLSASVGDRVTITCRASQDVSTAVAWYQQKPGKAPKLLIYSASFLYSGVPSRFSGSRSGTDFTLTISSLQPEDFATYYCQQHYTTPPTFGQGTKVEIKGGGGSGGGGSEPKTSDKTHTCPPCPAPELLGGPSVFLFPPKPKDTLMISRTPEVTCVVVAVSHEDPEVKFNWYVDGVEVHNAKTKPREEQYGSTYRVVSVLTVLHQDWLNGKEYKCKVSNKALPAPIEKTISKAKGQPREPMVFDLPPSREEMTKNQVSLWCMVKGFYPSDIAVEWESNGQPENNYKTTPPVLDSDGSFFLYSKLTVDKSRWQQGNVFSCSVMHEALHNHYTQKSLSLSPGKGGGSGGGSGGGSGGGSGSTGEVQLVESGGGLVQPGGSLRLSCAASGFNIAYSSMHWVRQAPGKGLEWVATIYPSYSSTYYADSVKGRFTISADTSKNTAYLQMNSLRAEDTAVYYCARYYDMDYWGQGTLVTVSSASTKGPSVFPLAPSSKSTSGGTAALGCLVKDYFPEPVTVSWNSGALTSGVHTFPAVLQSSGLYSLSSVVTVPSSSLGTQTYICNVNHKPSNTKVDKKVEPKSCDKTHT

SEQ ID NO: 992 - protein, 229 aa, Artificial Sequence
  Description of Artificial Sequence: Synthetic polypeptide
MNLLLILTFVAAAVADIQMTQSPSSLSASVGDRVTITCRASQSVSSAVAWYQQKPGKAPKLLIYSASSLYSGVPSRFSGSRSGTDFTLTISSLQPEDFATYYCQQAHYFPITFGQGTKVEIKRTVAAPSVFIFPPSDEQLKSGTASVVCLLNNFYPREAKVQWKVDNALQSGNSQESVTEQDSKDSTYSLSSTLTLSKADYEKHKVYACEVTHQGLSSPVTKSFNRGEC

SEQ ID NO: 993 - protein, 741 aa, Artificial Sequence
  Description of Artificial Sequence: Synthetic polypeptide
MNLLLILTFVAAAVAEFEVQLVESGGGLVQPGGSLRLSCAASGFNIGSSSIHWVRQAPGKGLEWVASIYSAFASTSYADSVKGRFTISADTSKNTAYLQMNSLRAEDTAVYYCARYHFPFGFALDYWGQGTLVTVSSGGGGSDIQMTQSPSSLSASVGDRVTITCRASQSVSSAVAWYQQKPGKAPKLLIYSASSLYSGVPSRFSGSRSGTDFTLTISSLQPEDFATYYCQQGVYLFTFGQGTKVEIKLEDKTHTKVEPKSSDKTHTCPPCPAPELLGGPSVFLFPPKPKDTLMISRTPEVTCVVVDVSHEDPEVKFNWYVDGVEVHNAKTKPREEQYNSTYRVVSVLTVLHQDWLNGKEYKCKVSNKALPAPIEKTISKAKGQPREPQVYTLPPSREEMTKNQVSLTCLVKGFYPSDIAVEWESNGQPENNYKTTPPVLDSDGSFFLYSKLTVDKSRWQQGNVFSCSVMHEALHNHYTQKSLSLSPGKSGSETPGTSESATPESGGGEVQLVESGGGLVQPGGSLRLSCAASGFNISYSSIHWVRQAPGKGLEWVAYISSYYGYTYYADSVKGRFTISADTSKNTAYLQMNSLRAEDTAVYYCARAHYFPWAGAMDYWGQGTLVTVSSGGGGSDIQMTQSPSSLSASVGDRVTITCRASQSVSSAVAWYQQKPGKAPKLLIYSASSLYSGVPSRFSGSRSGTDFTLTISSLQPEDFATYYCQQYSWGPFTFGQGTKVEIK

SEQ ID NO: 994 - protein, 746 aa, Artificial Sequence
  Description of Artificial Sequence: Synthetic polypeptide
MNLLLILTFVAAAVAEFEVQLVESGGGLVQPGGSLRLSCAASGFNIGSSSIHWVRQAPGKGLEWVASIYSAFASTSYADSVKGRFTISADTSKNTAYLQMNSLRAEDTAVYYCARYHFPFGFALDYWGQGTLVTVSSGGGGSDIQMTQSPSSLSASVGDRVTITCRASQSVSSAVAWYQQKPGKAPKLLIYSASSLYSGVPSRFSGSRSGTDFTLTISSLQPEDFATYYCQQGVYLFTFGQGTKVEIKLEDKTHTKVEPKSSDKTHNCPPCPAPELLGGPSVFLFPPKPKDTLMISRTPEVTCVVVDVSHEDPEVKFNWYVDGVEVHNAKTKPREEQYNSTYRVVSVLTVLHQDWLNGKEYKCKVSNKALPAPIEKTISKAKGQPREPQVYTLPPIRELMTSNQVSLSCAVKGFYPSDIAVEWESNGQPENNYKTTPPVLDSDGSFFLVSKLTVDKSRWQQGNVFSCSVMHEALHNHYTQKSLSLSPGKSGSETPGTSESATPESGGGEVQLVESGGGLVQPGGSLRLSCAASGFNISSYYIHWVRQAPGKGLEWVASIYSSYGYTSYADSVKGRFTISADTSKNTAYLQMNSLRAEDTAVYYCARTVRGSKKPYFSGWAMDYWGQGTLVTVSSGGGGSDIQMTQSPSSLSASVGDRVTITCRASQSVSSAVAWYQQKPGKAPKLLIYSASSLYSGVPSRFSGSRSGTDFTLTISSLQPEDFATYYCQQYSWGPFTFGQGTKVEIK

SEQ ID NO: 995 - protein, 740 aa, Artificial Sequence
  Description of Artificial Sequence: Synthetic polypeptide
MNLLLILTFVAAAVAEFEVQLVESGGGLVQPGGSLRLSCAASGFNIGSSSIHWVRQAPGKGLEWVASIYSAFASTSYADSVKGRFTISADTSKNTAYLQMNSLRAEDTAVYYCARYHFPFGFALDYWGQGTLVTVSSGGGGSDIQMTQSPSSLSASVGDRVTITCRASQSVSSAVAWYQQKPGKAPKLLIYSASSLYSGVPSRFSGSRSGTDFTLTISSLQPEDFATYYCQQGVYLFTFGQGTKVEIKLEDKTHTKVEPKTSDKTHTCPPCPAPELLGGPSVFLFPPKPKDTLMISRTPEVTCVVVDVSHEDPEVKFNWYVDGVEVHNAKTKPREEQYNSTYRVVSVLTVLHQDWLNGKEYKCKVSNKALPAPIEKTISKAKGQPREPMVFDLPPSREEMTKNQVSLWCMVKGFYPSDIAVEWESNGQPENNYKTTPPVLDSDGSFFLYSKLTVDKSRWQQGNVFSCSVMHEALHNHYTQKSLSLSPGKSGSETPGTSESATPESGGGEVQLVESGGGLVQPGGSLRLSCAASGFNISYSSIHWVRQAPGKGLEWVAYISSYYGYTYYADSVKGRFTISADTSKNTAYLQMNSLRAEDTAVYYCARAHYFPWAGAMDYWGQGTLVTVSSGGGGSDIQMTQSPSSLSASVGDRVTITCRASQSVSSAVAWYQQKPGKAPKLLIYSASSLYSGVPSRFSGSRSGTDFTLTISSLQPEDFATYYCQQYYWPITFGQGTKVEIK

SEQ ID NO: 996 - protein, 746 aa, Artificial Sequence
  Description of Artificial Sequence: Synthetic polypeptide
MNLLLILTFVAAAVAEFEVQLVESGGGLVQPGGSLRLSCAASGFNIHSSSIHWVRQAPGKGLEWVAATYSSFGSITYADSVKGRFTISADTSKNTAYLQMNSLRAEDTAVYYCARYHHPFGYALDYWGQGTLVTVSSGGGGSDIQMTQSPSSLSASVGDRVTITCRASQSVSSAVAWYQQKPGKAPKLLIYSASSLYSGVPSRFSGSRSGTDFTLTISSLQPEDFATYYCQQGVYLFTFGQGTKVEIKLEDKTHTKVEPKSSDKTHNCPPCPAPELLGGPSVFLFPPKPKDTLMISRTPEVTCVVVDVSHEDPEVKFNWYVDGVEVHNAKTKPREEQYNSTYRVVSVLTVLHQDWLNGKEYKCKVSNKALPAPIEKTISKAKGQPREPQVYTLPPIRELMTSNQVSLSCAVKGFYPSDIAVEWESNGQPENNYKTTPPVLDSDGSFFLVSKLTVDKSRWQQGNVFSCSVMHEALHNHYTQKSLSLSPGKSGSETPGTSESATPESGGGEVQLVESGGGLVQPGGSLRLSCAASGFNISSYYIHWVRQAPGKGLEWVASIYSSYGYTSYADSVKGRFTISADTSKNTAYLQMNSLRAEDTAVYYCARTVRGSKKPYFSGWAMDYWGQGTLVTVSSGGGGSDIQMTQSPSSLSASVGDRVTITCRASQSVSSAVAWYQQKPGKAPKLLIYSASSLYSGVPSRFSGSRSGTDFTLTISSLQPEDFATYYCQQYSWGPFTFGQGTKVEIK

SEQ ID NO: 997 - protein, 740 aa, Artificial Sequence
  Description of Artificial Sequence: Synthetic polypeptide
MNLLLILTFVAAAVAEFEVQLVESGGGLVQPGGSLRLSCAASGFNIHSSSIHWVRQAPGKGLEWVAATYSSFGSITYADSVKGRFTISADTSKNTAYLQMNSLRAEDTAVYYCARYHHPFGYALDYWGQGTLVTVSSGGGGSDIQMTQSPSSLSASVGDRVTITCRASQSVSSAVAWYQQKPGKAPKLLIYSASSLYSGVPSRFSGSRSGTDFTLTISSLQPEDFATYYCQQGVYLFTFGQGTKVEIKLEDKTHTKVEPKTSDKTHTCPPCPAPELLGGPSVFLFPPKPKDTLMISRTPEVTCVVVDVSHEDPEVKFNWYVDGVEVHNAKTKPREEQYNSTYRVVSVLTVLHQDWLNGKEYKCKVSNKALPAPIEKTISKAKGQPREPMVFDLPPSREEMTKNQVSLWCMVKGFYPSDIAVEWESNGQPENNYKTTPPVLDSDGSFFLYSKLTVDKSRWQQGNVFSCSVMHEALHNHYTQKSLSLSPGKSGSETPGTSESATPESGGGEVQLVESGGGLVQPGGSLRLSCAASGFNISYSSIHWVRQAPGKGLEWVAYISSYYGYTYYADSVKGRFTISADTSKNTAYLQMNSLRAEDTAVYYCARAHYFPWAGAMDYWGQGTLVTVSSGGGGSDIQMTQSPSSLSASVGDRVTITCRASQSVSSAVAWYQQKPGKAPKLLIYSASSLYSGVPSRFSGSRSGTDFTLTISSLQPEDFATYYCQQYYWPITFGQGTKVEIK

SEQ ID NO: 998 - protein, 752 aa, Artificial Sequence
  Description of Artificial Sequence: Synthetic polypeptide
MNLLLILTFVAAAVAEFEVQLVESGGGLVQPGGSLRLSCAASGFNIGSSSIHWVRQAPGKGLEWVASIYSAFASTSYADSVKGRFTISADTSKNTAYLQMNSLRAEDTAVYYCARYHFPFGFALDYWGQGTLVTVSSGGGGSDIQMTQSPSSLSASVGDRVTITCRASQSVSSAVAWYQQKPGKAPKLLIYSASSLYSGVPSRFSGSRSGTDFTLTISSLQPEDFATYYCQQGVYLFTFGQGTKVEIKLEDKTHTKVEPKSSDKTHNCPPCPAPELLGGPSVFLFPPKPKDTLMISRTPEVTCVVVDVSHEDPEVKFNWYVDGVEVHNAKTKPREEQYNSTYRVVSVLTVLHQDWLNGKEYKCKVSNKALPAPIEKTISKAKGQPREPQVYTLPPIRELMTSNQVSLSCAVKGFYPSDIAVEWESNGQPENNYKTTPPVLDSDGSFFLVSKLTVDKSRWQQGNVFSCSVMHEALHNHYTQKSLSLSPGKSGSETPGTSESATPESGGGDIQMTQSPSSLSASVGDRVTITCRASQSVSSAVAWYQQKPGKAPKLLIYSASSLYSGVPSRFSGSRSGTDFTLTISSLQPEDFATYYCQQYSWGPFTFGQGTKVEIKGTTAASGSSGGSSSGAEVQLVESGGGLVQPGGSLRLSCAASGFNISYSSIHWVRQAPGKGLEWVAYISSYYGYTYYADSVKGRFTISADTSKNTAYLQMNSLRAEDTAVYYCARAHYFPWAGAMDYWGQGTLVTVSS

SEQ ID NO: 999 - protein, 752 aa, Artificial Sequence
  Description of Artificial Sequence: Synthetic polypeptide
MNLLLILTFVAAAVAEFEVQLVESGGGLVQPGGSLRLSCAASGFNIGSSSIHWVRQAPGKGLEWVASIYSAFASTSYADSVKGRFTISADTSKNTAYLQMNSLRAEDTAVYYCARYHFPFGFALDYWGQGTLVTVSSGGGGSDIQMTQSPSSLSASVGDRVTITCRASQSVSSAVAWYQQKPGKAPKLLIYSASSLYSGVPSRFSGSRSGTDFTLTISSLQPEDFATYYCQQGVYLFTFGQGTKVEIKLEDKTHTKVEPKTSDKTHTCPPCPAPELLGGPSVFLFPPKPKDTLMISRTPEVTCVVVDVSHEDPEVKFNWYVDGVEVHNAKTKPREEQYNSTYRVVSVLTVLHQDWLNGKEYKCKVSNKALPAPIEKTISKAKGQPREPMVFDLPPSREEMTKNQVSLWCMVKGFYPSDIAVEWESNGQPENNYKTTPPVLDSDGSFFLYSKLTVDKSRWQQGNVFSCSVMHEALHNHYTQKSLSLSPGKSGSETPGTSESATPESGGGDIQMTQSPSSLSASVGDRVTITCRASQSVSSAVAWYQQKPGKAPKLLIYSASSLYSGVPSRFSGSRSGTDFTLTISSLQPEDFATYYCQQYSWGPFTFGQGTKVEIKGTTAASGSSGGSSSGAEVQLVESGGGLVQPGGSLRLSCAASGFNISYSSIHWVRQAPGKGLEWVAYISSYYGYTYYADSVKGRFTISADTSKNTAYLQMNSLRAEDTAVYYCARAHYFPWAGAMDYWGQGTLVTVSS

SEQ ID NO: 1000 - protein, 756 aa, Artificial Sequence
  Description of Artificial Sequence: Synthetic polypeptide
MNLLLILTFVAAAVAEFEVQLVESGGGLVQPGGSLRLSCAASGFNIGSSSIHWVRQAPGKGLEWVASIYSAFASTSYADSVKGRFTISADTSKNTAYLQMNSLRAEDTAVYYCARYHFPFGFALDYWGQGTLVTVSSGGGGSDIQMTQSPSSLSASVGDRVTITCRASQSVSSAVAWYQQKPGKAPKLLIYSASSLYSGVPSRFSGSRSGTDFTLTISSLQPEDFATYYCQQGVYLFTFGQGTKVEIKLEDKTHTKVEPKSSDKTHNCPPCPAPELLGGPSVFLFPPKPKDTLMISRTPEVTCVVVDVSHEDPEVKFNWYVDGVEVHNAKTKPREEQYNSTYRVVSVLTVLHQDWLNGKEYKCKVSNKALPAPIEKTISKAKGQPREPQVYTLPPIRELMTSNQVSLSCAVKGFYPSDIAVEWESNGQPENNYKTTPPVLDSDGSFFLVSKLTVDKSRWQQGNVFSCSVMHEALHNHYTQKSLSLSPGKSGSETPGTSESATPESGGGDIQMTQSPSSLSASVGDRVTITCRASQSVSSAVAWYQQKPGKAPKLLIYSASSLYSGVPSRFSGSRSGTDFTLTISSLQPEDFATYYCQQYYWPITFGQGTKVEIKGTTAASGSSGGSSSGAEVQLVESGGGLVQPGGSLRLSCAASGFNISSYYIHWVRQAPGKGLEWVASIYSSYGYTSYADSVKGRFTISADTSKNTAYLQMNSLRAEDTAVYYCARTVRGSKKPYFSGWAMDYWGQGTLVTVSS

SEQ ID NO: 1001 - protein, 756 aa, Artificial Sequence
  Description of Artificial Sequence: Synthetic polypeptide
MNLLLILTFVAAAVAEFEVQLVESGGGLVQPGGSLRLSCAASGFNIGSSSIHWVRQAPGKGLEWVASIYSAFASTSYADSVKGRFTISADTSKNTAYLQMNSLRAEDTAVYYCARYHFPFGFALDYWGQGTLVTVSSGGGGSDIQMTQSPSSLSASVGDRVTITCRASQSVSSAVAWYQQKPGKAPKLLIYSASSLYSGVPSRFSGSRSGTDFTLTISSLQPEDFATYYCQQGVYLFTFGQGTKVEIKLEDKTHTKVEPKTSDKTHTCPPCPAPELLGGPSVFLFPPKPKDTLMISRTPEVTCVVVDVSHEDPEVKFNWYVDGVEVHNAKTKPREEQYNSTYRVVSVLTVLHQDWLNGKEYKCKVSNKALPAPIEKTISKAKGQPREPMVFDLPPSREEMTKNQVSLWCMVKGFYPSDIAVEWESNGQPENNYKTTPPVLDSDGSFFLYSKLTVDKSRWQQGNVFSCSVMHEALHNHYTQKSLSLSPGKSGSETPGTSESATPESGGGDIQMTQSPSSLSASVGDRVTITCRASQSVSSAVAWYQQKPGKAPKLLIYSASSLYSGVPSRFSGSRSGTDFTLTISSLQPEDFATYYCQQYYWPITFGQGTKVEIKGTTAASGSSGGSSSGAEVQLVESGGGLVQPGGSLRLSCAASGFNISSYYIHWVRQAPGKGLEWVASIYSSYGYTSYADSVKGRFTISADTSKNTAYLQMNSLRAEDTAVYYCARTVRGSKKPYFSGWAMDYWGQGTLVTVSS

SEQ ID NO: 1002 - protein, 757 aa, Artificial Sequence
  Description of Artificial Sequence: Synthetic polypeptide
MNLLLILTFVAAAVAEFEVQLVESGGGLVQPGGSLRLSCAASGFNISSYYIHWVRQAPGKGLEWVASIYSSYGYTSYADSVKGRFTISADTSKNTAYLQMNSLRAEDTAVYYCARTVRGSKKPYFSGWAMDYWGQGTLVTVSSGGGGSDIQMTQSPSSLSASVGDRVTITCRASQSVSSAVAWYQQKPGKAPKLLIYSASSLYSGVPSRFSGSRSGTDFTLTISSLQPEDFATYYCQQYSWGPFTFGQGTKVEIKLEDKTHTKVEPKSSDKTHNCPPCPAPELLGGPSVFLFPPKPKDTLMISRTPEVTCVVVDVSHEDPEVKFNWYVDGVEVHNAKTKPREEQYNSTYRVVSVLTVLHQDWLNGKEYKCKVSNKALPAPIEKTISKAKGQPREPQVYTLPPIRELMTSNQVSLSCAVKGFYPSDIAVEWESNGQPENNYKTTPPVLDSDGSFFLVSKLTVDKSRWQQGNVFSCSVMHEALHNHYTQKSLSLSPGKSGSETPGTSESATPESGGGEVQLVESGGGLVQPGGSLRLSCAASGFNIHSSSIHWVRQAPGKGLEWVAATYSSFGSITYADSVKGRFTISADTSKNTAYLQMNSLRAEDTAVYYCARYHHPFGYALDYWGQGTLVTVSSGTTAASGSSGGSSSGADIQMTQSPSSLSASVGDRVTITCRASQSVSSAVAWYQQKPGKAPKLLIYSASSLYSGVPSRFSGSRSGTDFTLTISSLQPEDFATYYCQQGVYLFTFGQGTKVEIK

SEQ ID NO: 1003 - protein, 750 aa, Artificial Sequence
  Description of Artificial Sequence: Synthetic polypeptide
MNLLLILTFVAAAVAEFEVQLVESGGGLVQPGGSLRLSCAASGFNISYSSIHWVRQAPGKGLEWVAYISSYYGYTYYADSVKGRFTISADTSKNTAYLQMNSLRAEDTAVYYCARAHYFPWAGAMDYWGQGTLVTVSSGGGGDIQMTQSPSSLSASVGDRVTITCRASQSVSSAVAWYQQKPGKAPKLLIYSASSLYSGVPSRFSGSRSGTDFTLTISSLQPEDFATYYCQQYYWPITFGQGTKVEIKLEDKTHTKVEPKTSDKTHTCPPCPAPELLGGPSVFLFPPKPKDTLMISRTPEVTCVVVDVSHEDPEVKFNWYVDGVEVHNAKTKPREEQYNSTYRVVSVLTVLHQDWLNGKEYKCKVSNKALPAPIEKTISKAKGQPREPMVFDLPPSREEMTKNQVSLWCMVKGFYPSDIAVEWESNGQPENNYKTTPPVLDSDGSFFLYSKLTVDKSRWQQGNVFSCSVMHEALHNHYTQKSLSLSPGKSGSETPGTSESATPESGGGEVQLVESGGGLVQPGGSLRLSCAASGFNIHSSSIHWVRQAPGKGLEWVAATYSSFGSITYADSVKGRFTISADTSKNTAYLQMNSLRAEDTAVYYCARYHHPFGYALDYWGQGTLVTVSSGTTAASGSSGGSSSGADIQMTQSPSSLSASVGDRVTITCRASQSVSSAVAWYQQKPGKAPKLLIYSASSLYSGVPSRFSGSRSGTDFTLTISSLQPEDFATYYCQQGVYLFTFGQGTKVEIK

SEQ ID NO: 1004 - protein, 757 aa, Artificial Sequence
  Description of Artificial Sequence: Synthetic polypeptide
MNLLLILTFVAAAVAEFDIQMTQSPSSLSASVGDRVTITCRASQSVSSAVAWYQQKPGKAPKLLIYSASSLYSGVPSRFSGSRSGTDFTLTISSLQPEDFATYYCQQGVYLFTFGQGTKVEIKGTTAASGSSGGSSSGAEVQLVESGGGLVQPGGSLRLSCAASGFNIGSSSIHWVRQAPGKGLEWVASIYSAFASTSYADSVKGRFTISADTSKNTAYLQMNSLRAEDTAVYYCARYHFPFGFALDYWGQGTLVTVSSLEDKTHTKVEPKSSDKTHNCPPCPAPELLGGPSVFLFPPKPKDTLMISRTPEVTCVVVDVSHEDPEVKFNWYVDGVEVHNAKTKPREEQYNSTYRVVSVLTVLHQDWLNGKEYKCKVSNKALPAPIEKTISKAKGQPREPQVYTLPPIRELMTSNQVSLSCAVKGFYPSDIAVEWESNGQPENNYKTTPPVLDSDGSFFLVSKLTVDKSRWQQGNVFSCSVMHEALHNHYTQKSLSLSPGKSGSETPGTSESATPESGGGEVQLVESGGGLVQPGGSLRLSCAASGFNISSYYIHWVRQAPGKGLEWVASIYSSYGYTSYADSVKGRFTISADTSKNTAYLQMNSLRAEDTAVYYCARTVRGSKKPYFSGWAMDYWGQGTLVTVSSGGGGSDIQMTQSPSSLSASVGDRVTITCRASQSVSSAVAWYQQKPGKAPKLLIYSASSLYSGVPSRFSGSRSGTDFTLTISSLQPEDFATYYCQQYSWGPFTFGQGTKVEIK

SEQ ID NO: 1005 - protein, 751 aa, Artificial Sequence
  Description of Artificial Sequence: Synthetic polypeptide
MNLLLILTFVAAAVAEFDIQMTQSPSSLSASVGDRVTITCRASQSVSSAVAWYQQKPGKAPKLLIYSASSLYSGVPSRFSGSRSGTDFTLTISSLQPEDFATYYCQQGVYLFTFGQGTKVEIKGTTAASGSSGGSSSGAEVQLVESGGGLVQPGGSLRLSCAASGFNIGSSSIHWVRQAPGKGLEWVASIYSAFASTSYADSVKGRFTISADTSKNTAYLQMNSLRAEDTAVYYCARYHFPFGFALDYWGQGTLVTVSSLEDKTHTKVEPKTSDKTHTCPPCPAPELLGGPSVFLFPPKPKDTLMISRTPEVTCVVVDVSHEDPEVKFNWYVDGVEVHNAKTKPREEQYNSTYRVVSVLTVLHQDWLNGKEYKCKVSNKALPAPIEKTISKAKGQPREPMVFDLPPSREEMTKNQVSLWCMVKGFYPSDIAVEWESNGQPENNYKTTPPVLDSDGSFFLYSKLTVDKSRWQQGNVFSCSVMHEALHNHYTQKSLSLSPGKSGSETPGTSESATPESGGGEVQLVESGGGLVQPGGSLRLSCAASGFNISYSSIHWVRQAPGKGLEWVAYISSYYGYTYYADSVKGRFTISADTSKNTAYLQMNSLRAEDTAVYYCARAHYFPWAGAMDYWGQGTLVTVSSGGGGSDIQMTQSPSSLSASVGDRVTITCRASQSVSSAVAWYQQKPGKAPKLLIYSASSLYSGVPSRFSGSRSGTDFTLTISSLQPEDFATYYCQQYYWPITFGQGTKVEIK

SEQ ID NO: 1006 - protein, 767 aa, Artificial Sequence
  Description of Artificial Sequence: Synthetic polypeptide
MNLLLILTFVAAAVAEFDIQMTQSPSSLSASVGDRVTITCRASQSVSSAVAWYQQKPGKAPKLLIYSASSLYSGVPSRFSGSRSGTDFTLTISSLQPEDFATYYCQQGVYLFTFGQGTKVEIKGTTAASGSSGGSSSGAEVQLVESGGGLVQPGGSLRLSCAASGFNIGSSSIHWVRQAPGKGLEWVASIYSAFASTSYADSVKGRFTISADTSKNTAYLQMNSLRAEDTAVYYCARYHFPFGFALDYWGQGTLVTVSSLEDKTHTKVEPKSSDKTHNCPPCPAPELLGGPSVFLFPPKPKDTLMISRTPEVTCVVVDVSHEDPEVKFNWYVDGVEVHNAKTKPREEQYNSTYRVVSVLTVLHQDWLNGKEYKCKVSNKALPAPIEKTISKAKGQPREPQVYTLPPIRELMTSNQVSLSCAVKGFYPSDIAVEWESNGQPENNYKTTPPVLDSDGSFFLVSKLTVDKSRWQQGNVFSCSVMHEALHNHYTQKSLSLSPGKSGSETPGTSESATPESGGGDIQMTQSPSSLSASVGDRVTITCRASQSVSSAVAWYQQKPGKAPKLLIYSASSLYSGVPSRFSGSRSGTDFTLTISSLQPEDFATYYCQQYYWPITFGQGTKVEIKGTTAASGSSGGSSSGAEVQLVESGGGLVQPGGSLRLSCAASGFNISSYYIHWVRQAPGKGLEWVASIYSSYGYTSYADSVKGRFTISADTSKNTAYLQMNSLRAEDTAVYYCARTVRGSKKPYFSGWAMDYWGQGTLVTVSS

SEQ ID NO: 1007 - protein, 763 aa, Artificial Sequence
  Description of Artificial Sequence: Synthetic polypeptide
MNLLLILTFVAAAVAEFDIQMTQSPSSLSASVGDRVTITCRASQSVSSAVAWYQQKPGKAPKLLIYSASSLYSGVPSRFSGSRSGTDFTLTISSLQPEDFATYYCQQGVYLFTFGQGTKVEIKGTTAASGSSGGSSSGAEVQLVESGGGLVQPGGSLRLSCAASGFNIGSSSIHWVRQAPGKGLEWVASIYSAFASTSYADSVKGRFTISADTSKNTAYLQMNSLRAEDTAVYYCARYHFPFGFALDYWGQGTLVTVSSLEDKTHTKVEPKTSDKTHTCPPCPAPELLGGPSVFLFPPKPKDTLMISRTPEVTCVVVDVSHEDPEVKFNWYVDGVEVHNAKTKPREEQYNSTYRVVSVLTVLHQDWLNGKEYKCKVSNKALPAPIEKTISKAKGQPREPMVFDLPPSREEMTKNQVSLWCMVKGFYPSDIAVEWESNGQPENNYKTTPPVLDSDGSFFLYSKLTVDKSRWQQGNVFSCSVMHEALHNHYTQKSLSLSPGKSGSETPGTSESATPESGGGDIQMTQSPSSLSASVGDRVTITCRASQSVSSAVAWYQQKPGKAPKLLIYSASSLYSGVPSRFSGSRSGTDFTLTISSLQPEDFATYYCQQYSWGPFTFGQGTKVEIKGTTAASGSSGGSSSGAEVQLVESGGGLVQPGGSLRLSCAASGFNISYSSIHWVRQAPGKGLEWVAYISSYYGYTYYADSVKGRFTISADTSKNTAYLQMNSLRAEDTAVYYCARAHYFPWAGAMDYWGQGTLVTVSS

SEQ ID NO: 1008 - protein, 228 aa, Artificial Sequence
  Description of Artificial Sequence: Synthetic polypeptide
MNLLLILTFVAAAVADIQMTQSPSSLSASVGDRVTITCRASQSVSSAVAWYQQKPGKAPKLLIYSASSLYSGVPSRFSGSRSGTDFTLTISSLQPEDFATYYCQQGVYLFTFGQGTKVEIKRTVAAPSVFIFPPSDEQLKSGTASVVCLLNNFYPREAKVQWKVDNALQSGNSQESVTEQDSKDSTYSLSSTLTLSKADYEKHKVYACEVTHQGLSSPVTKSFNRGEC

SEQ ID NO: 1009 - protein, 722 aa, Artificial Sequence
  Description of Artificial Sequence: Synthetic polypeptide
MNLLLILTFVAAAVAEVQLVESGGGLVQPGGSLRLSCAASGFNIHSSSIHWVRQAPGKGLEWVAATYSSFGSITYADSVKGRFTISADTSKNTAYLQMNSLRAEDTAVYYCARYHHPFGYALDYWGQGTLVTVSSASTKGPSVFPLAPSSKSTSGGTAALGCLVKDYFPEPVTVSWNSGALTSGVHTFPAVLQSSGLYSLSSVVTVPSSSLGTQTYICNVNHKPSNTKVDKKVEPKSCDKTHTCPPCPAPELLGGPSVFLFPPKPKDTLMISRTPEVTCVVVDVSHEDPEVKFNWYVDGVEVHNAKTKPREEQYNSTYRVVSVLTVLHQDWLNGKEYKCKVSNKALPAPIEKTISKAKGQPREPQVYTLPPIRELMTSNQVSLSCAVKGFYPSDIAVEWESNGQPENNYKTTPPVLDSDGSFFLVSKLTVDKSRWQQGNVFSCSVMHEALHNHYTQKSLSLSPGKSGSETPGTSESATPESGGGEVQLVESGGGLVQPGGSLRLSCAASGFNISSYYIHWVRQAPGKGLEWVASIYSSYGYTSYADSVKGRFTISADTSKNTAYLQMNSLRAEDTAVYYCARTVRGSKKPYFSGWAMDYWGQGTLVTVSSGGGGSDIQMTQSPSSLSASVGDRVTITCRASQSVSSAVAWYQQKPGKAPKLLIYSASSLYSGVPSRFSGSRSGTDFTLTISSLQPEDFATYYCQQYSWGPFTFGQGTKVEIK

SEQ ID NO: 1010 - protein, 716 aa, Artificial Sequence
  Description of Artificial Sequence: Synthetic polypeptide
MNLLLILTFVAAAVAEVQLVESGGGLVQPGGSLRLSCAASGFNIHSSSIHWVRQAPGKGLEWVAATYSSFGSITYADSVKGRFTISADTSKNTAYLQMNSLRAEDTAVYYCARYHHPFGYALDYWGQGTLVTVSSASTKGPSVFPLAPSSKSTSGGTAALGCLVKDYFPEPVTVSWNSGALTSGVHTFPAVLQSSGLYSLSSVVTVPSSSLGTQTYICNVNHKPSNTKVDKKVEPKSCDKTHTCPPCPAPELLGGPSVFLFPPKPKDTLMISRTPEVTCVVVDVSHEDPEVKFNWYVDGVEVHNAKTKPREEQYNSTYRVVSVLTVLHQDWLNGKEYKCKVSNKALPAPIEKTISKAKGQPREPMVFDLPPSREEMTKNQVSLWCMVKGFYPSDIAVEWESNGQPENNYKTTPPVLDSDGSFFLYSKLTVDKSRWQQGNVFSCSVMHEALHNHYTQKSLSLSPGKSGSETPGTSESATPESGGGEVQLVESGGGLVQPGGSLRLSCAASGFNISYSSIHWVRQAPGKGLEWVAYISSYYGYTYYADSVKGRFTISADTSKNTAYLQMNSLRAEDTAVYYCARAHYFPWAGAMDYWGQGTLVTVSSGGGGSDIQMTQSPSSLSASVGDRVTITCRASQSVSSAVAWYQQKPGKAPKLLIYSASSLYSGVPSRFSGSRSGTDFTLTISSLQPEDFATYYCQQYYWPITFGQGTKVEIK

SEQ ID NO: 1011 - protein, 717 aa, Artificial Sequence
  Description of Artificial Sequence: Synthetic polypeptide
MNLLLILTFVAAAVAEVQLVESGGGLVQPGGSLRLSCAASGFNIHSSSIHWVRQAPGKGLEWVAATYSSFGSITYADSVKGRFTISADTSKNTAYLQMNSLRAEDTAVYYCARYHHPFGYALDYWGQGTLVTVSSASTKGPSVFPLAPSSKSTSGGTAALGCLVKDYFPEPVTVSWNSGALTSGVHTFPAVLQSSGLYSLSSVVTVPSSSLGTQTYICNVNHKPSNTKVDKKVEPKSCDKTHTCPPCPAPELLGGPSVFLFPPKPKDTLMISRTPEVTCVVVDVSHEDPEVKFNWYVDGVEVHNAKTKPREEQYNSTYRVVSVLTVLHQDWLNGKEYKCKVSNKALPAPIEKTISKAKGQPREPQVYTLPPSREEMTKNQVSLTCLVKGFYPSDIAVEWESNGQPENNYKTTPPVLDSDGSFFLYSKLTVDKSRWQQGNVFSCSVMHEALHNHYTQKSLSLSPGKSGSETPGTSESATPESGGGEVQLVESGGGLVQPGGSLRLSCAASGFNISYSSIHWVRQAPGKGLEWVAYISSYYGYTYYADSVKGRFTISADTSKNTAYLQMNSLRAEDTAVYYCARAHYFPWAGAMDYWGQGTLVTVSSGGGGSDIQMTQSPSSLSASVGDRVTITCRASQSVSSAVAWYQQKPGKAPKLLIYSASSLYSGVPSRFSGSRSGTDFTLTISSLQPEDFATYYCQQYSWGPFTFGQGTKVEIK

SEQ ID NO: 1012 - protein, 728 aa, Artificial Sequence
  Description of Artificial Sequence: Synthetic polypeptide
MNLLLILTFVAAAVAEVQLVESGGGLVQPGGSLRLSCAASGFNIHSSSIHWVRQAPGKGLEWVAATYSSFGSITYADSVKGRFTISADTSKNTAYLQMNSLRAEDTAVYYCARYHHPFGYALDYWGQGTLVTVSSASTKGPSVFPLAPSSKSTSGGTAALGCLVKDYFPEPVTVSWNSGALTSGVHTFPAVLQSSGLYSLSSVVTVPSSSLGTQTYICNVNHKPSNTKVDKKVEPKSCDKTHTCPPCPAPELLGGPSVFLFPPKPKDTLMISRTPEVTCVVVDVSHEDPEVKFNWYVDGVEVHNAKTKPREEQYNSTYRVVSVLTVLHQDWLNGKEYKCKVSNKALPAPIEKTISKAKGQPREPQVYTLPPSREEMTKNQVSLTCLVKGFYPSDIAVEWESNGQPENNYKTTPPVLDSDGSFFLYSKLTVDKSRWQQGNVFSCSVMHEALHNHYTQKSLSLSPGKSGSETPGTSESATPESGGGDIQMTQSPSSLSASVGDRVTITCRASQSVSSAVAWYQQKPGKAPKLLIYSASSLYSGVPSRFSGSRSGTDFTLTISSLQPEDFATYYCQQYSWGPFTFGQGTKVEIKGTTAASGSSGGSSSGAEVQLVESGGGLVQPGGSLRLSCAASGFNISYSSIHWVRQAPGKGLEWVAYISSYYGYTYYADSVKGRFTISADTSKNTAYLQMNSLRAEDTAVYYCARAHYFPWAGAMDYWGQGTLVTVSS

SEQ ID NO: 1013 - protein, 732 aa, Artificial Sequence
  Description of Artificial Sequence: Synthetic polypeptide
MNLLLILTFVAAAVAEVQLVESGGGLVQPGGSLRLSCAASGFNIHSSSIHWVRQAPGKGLEWVAATYSSFGSITYADSVKGRFTISADTSKNTAYLQMNSLRAEDTAVYYCARYHHPFGYALDYWGQGTLVTVSSASTKGPSVFPLAPSSKSTSGGTAALGCLVKDYFPEPVTVSWNSGALTSGVHTFPAVLQSSGLYSLSSVVTVPSSSLGTQTYICNVNHKPSNTKVDKKVEPKSCDKTHTCPPCPAPELLGGPSVFLFPPKPKDTLMISRTPEVTCVVVDVSHEDPEVKFNWYVDGVEVHNAKTKPREEQYNSTYRVVSVLTVLHQDWLNGKEYKCKVSNKALPAPIEKTISKAKGQPREPQVYTLPPSREEMTKNQVSLTCLVKGFYPSDIAVEWESNGQPENNYKTTPPVLDSDGSFFLYSKLTVDKSRWQQGNVFSCSVMHEALHNHYTQKSLSLSPGKSGSETPGTSESATPESGGGDIQMTQSPSSLSASVGDRVTITCRASQSVSSAVAWYQQKPGKAPKLLIYSASSLYSGVPSRFSGSRSGTDFTLTISSLQPEDFATYYCQQYYWPITFGQGTKVEIKGTTAASGSSGGSSSGAEVQLVESGGGLVQPGGSLRLSCAASGFNISSYYIHWVRQAPGKGLEWVASIYSSYGYTSYADSVKGRFTISADTSKNTAYLQMNSLRAEDTAVYYCARTVRGSKKPYFSGWAMDYWGQGTLVTVSS

SEQ ID NO: 1014 - protein, 742 aa, Artificial Sequence
  Description of Artificial Sequence: Synthetic polypeptide
MNLLLILTFVAAAVAEFEVQLVESGGGLVQPGGSLRLSCAASGFNISSYYIHWVRQAPGKGLEWVASIYSSYGYTSYADSVKGRFTISADTSKNTAYLQMNSLRAEDTAVYYCARTVRGSKKPYFSGWAMDYWGQGTLVTVSSGGGGSDIQMTQSPSSLSASVGDRVTITCRASQSVSSAVAWYQQKPGKAPKLLIYSASSLYSGVPSRFSGSRSGTDFTLTISSLQPEDFATYYCQQYYFLITFGQGTKVEIKLEDKTHTKVEPKSSDKTHNCPPCPAPELLGGPSVFLFPPKPKDTLMISRTPEVTCVVVDVSHEDPEVKFNWYVDGVEVHNAKTKPREEQYNSTYRVVSVLTVLHQDWLNGKEYKCKVSNKALPAPIEKTISKAKGQPREPQVYTLPPIRELMTSNQVSLSCAVKGFYPSDIAVEWESNGQPENNYKTTPPVLDSDGSFFLVSKLTVDKSRWQQGNVFSCSVMHEALHNHYTQKSLSLSPGKSGSETPGTSESATPESGGGEVQLVESGGGLVQPGGSLRLSCAASGFNIHSSSIHWVRQAPGKGLEWVAATYSSFGSITYADSVKGRFTISADTSKNTAYLQMNSLRAEDTAVYYCARYHHPFGYALDYWGQGTLVTVSSASTKGPSVFPLAPSSKSTSGGTAALGCLVKDYFPEPVTVSWNSGALTSGVHTFPAVLQSSGLYSLSSVVTVPSSSLGTQTYICNVNHKPSNTKVDKKVEPKSCDKTHT

SEQ ID NO: 1015 - protein, 737 aa, Artificial Sequence
  Description of Artificial Sequence: Synthetic polypeptide
MNLLLILTFVAAAVAEFEVQLVESGGGLVQPGGSLRLSCAASGFNISYSSIHWVRQAPGKGLEWVASISPYYGYTYYADSVKGRFTISADTSKNTAYLQMNSLRAEDTAVYYCARSSYFPWFSAMDYWGQGTLVTVSSGGGGSDIQMTQSPSSLSASVGDRVTITCRASQSVSSAVAWYQQKPGKAPKLLIYSASSLYSGVPSRFSGSRSGTDFTLTISSLQPEDFATYYCQQYYWPITFGQGTKVEIKLEDKTHTKVEPKTSDKTHTCPPCPAPELLGGPSVFLFPPKPKDTLMISRTPEVTCVVVDVSHEDPEVKFNWYVDGVEVHNAKTKPREEQYNSTYRVVSVLTVLHQDWLNGKEYKCKVSNKALPAPIEKTISKAKGQPREPMVFDLPPSREEMTKNQVSLWCMVKGFYPSDIAVEWESNGQPENNYKTTPPVLDSDGSFFLYSKLTVDKSRWQQGNVFSCSVMHEALHNHYTQKSLSLSPGKSGSETPGTSESATPESGGGEVQLVESGGGLVQPGGSLRLSCAASGFNIHSSSIHWVRQAPGKGLEWVAATYSSFGSITYADSVKGRFTISADTSKNTAYLQMNSLRAEDTAVYYCARYHHPFGYALDYWGQGTLVTVSSASTKGPSVFPLAPSSKSTSGGTAALGCLVKDYFPEPVTVSWNSGALTSGVHTFPAVLQSSGLYSLSSVVTVPSSSLGTQTYICNVNHKPSNTKVDKKVEPKSCDKTHT

SEQ ID NO: 1016 - protein, 480 aa, Artificial Sequence
  Description of Artificial Sequence: Synthetic polypeptide
MNLLLILTFVAAAVAEVQLVESGGGLVQPGGSLRLSCAASGFNIHSSSIHWVRQAPGKGLEWVAATYSSFGSITYADSVKGRFTISADTSKNTAYLQMNSLRAEDTAVYYCARYHHPFGYALDYWGQGTLVTVSSASTKGPSVFPLAPSSKSTSGGTAALGCLVKDYFPEPVTVSWNSGALTSGVHTFPAVLQSSGLYSLSSVVTVPSSSLGTQTYICNVNHKPSNTKVDKKVEPKSCDKTHTGGSGGEVQLVESGGGLVQPGGSLRLSCAASGFTISYSSIHWVRQAPGKGLEWVASISPYYGYTYYADSVKGRFTISADTSKNTAYLQMNSLRAEDTAVYYCARSSYFPWFSAMDYWGQGTLVTVSSGGGGSDIQMTQSPSSLSASVGDRVTITCRASQSVSSAVAWYQQKPGKAPKLLIYSASSLYSGVPSRFSGSRSGTDFTLTISSLQPEDFATYYCQQYYWPITFGQGTKVEIK

SEQ ID NO: 1017 - protein, 470 aa, Artificial Sequence
  Description of Artificial Sequence: Synthetic polypeptide
MNLLLILTFVAAAVADIQMTQSPSSLSASVGDRVTITCRASQSVSSAVAWYQQKPGKAPKLLIYSASSLYSGVPSRFSGSRSGTDFTLTISSLQPEDFATYYCQQGVYLFTFGQGTKVEIKRTVAAPSVFIFPPSDEQLKSGTASVVCLLNNFYPREAKVQWKVDNALQSGNSQESVTEQDSKDSTYSLSSTLTLSKADYEKHKVYACEVTHQGLSSPVTKSFNRGECGGGGSEVQLVESGGGLVQPGGSLRLSCAASGFTISSYYIHWVRQAPGKGLEWVASIYSSYGYTSYADSVKGRFTISADTSKNTAYLQMNSLRAEDTAVYYCARTVRGSKKPYFSGWAMDYWGQGTLVTVSSGGGGSDIQMTQSPSSLSASVGDRVTITCRASQSVSSAVAWYQQKPGKAPKLLIYSASSLYSGVPSRFSGSRSGTDFTLTISSLQPEDFATYYCQQYYFLITFGQGTKVEIK

SEQ ID NO: 1018 - protein, 629 aa, Artificial Sequence
  Description of Artificial Sequence: Synthetic polypeptide
MNLLLILTFVAAAVAEFEVQLVESGGGLVQPGGSLRLSCAASGFNIGSSSIHWVRQAPGKGLEWVASIYSAFASTSYADSVKGRFTISADTSKNTAYLQMNSLRAEDTAVYYCARYHFPFGFALDYWGQGTLVTVSSGGGGSDIQMTQSPSSLSASVGDRVTITCRASQSVSSAVAWYQQKPGKAPKLLIYSASSLYSGVPSRFSGSRSGTDFTLTISSLQPEDFATYYCQQGVYLFTFGQGTKVEIKDKTHTKVEPKTSDKTHTCPPCPGQPREPQVYTLPPSREEMTKNQVSLTCLVKGFYPSDIAVEWESNGQPENNYKTTPPVLDSDGSFFLYSKLTVDKSRWQQGNVFSCSVMHEALHNHYTQKSLSLSPGKGTTAASGSSGGSSSGAGRTEVQLVESGGGLVQPGGSLRLSCAASGFNISYSSIHWVRQAPGKGLEWVAYISSYYGYTYYADSVKGRFTISADTSKNTAYLQMNSLRAEDTAVYYCARAHYFPWAGAMDYWGQGTLVTVSSGGGGSDIQMTQSPSSLSASVGDRVTITCRASQSVSSAVAWYQQKPGKAPKLLIYSASSLYSGVPSRFSGSRSGTDFTLTISSLQPEDFATYYCQQYSWGPFTFGQGTKVEIK

SEQ ID NO: 1019 - protein, 738 aa, Artificial Sequence
  Description of Artificial Sequence: Synthetic polypeptide
EVQLVESGGGLVQPGGSLRLSCAASGFNISYSYMHWVRQAPGKGLEWVASISPYYSYTSYADSVKGRFTISADTSKNTAYLQMNSLRAEDTAVYYCARPSAWSHYYPSSSSSAFDYWGQGTLVTVSSGGGGSDIQMTQSPSSLSASVGDRVTITCRASQSVSSAVAWYQQKPGKAPKLLIYSASSLYSGVPSRFSGSRSGTDFTLTISSLQPEDFATYYCQQSSYSLITFGQGTKVEIKLEDKTHTKVEPKSSDKTHTCPPCPAPELLGGPSVFLFPPKPKDTLMISRTPEVTCVVVDVSHEDPEVKFNWYVDGVEVHNAKTKPREEQYNSTYRVVSVLTVLHQDWLNGKEYKCKVSNKALPAPIEKTISKAKGQPREPQVYTLPPSREEMTKNQVSLTCLVKGFYPSDIAVEWESNGQPENNYKTTPPVLDSDGSFFLYSKLTVDKSRWQQGNVFSCSVMHEALHNHYTQKSLSLSPGKSGSETPGTSESATPESGGGEVQLVESGGGLVQPGGSLRLSCAASGFNISYSYMHWVRQAPGKGLEWVASISPYYSYTSYADSVKGRFTISADTSKNTAYLQMNSLRAEDTAVYYCARPSAWSHYYPSSSSSAFDYWGQGTLVTVSSGGGGSDIQMTQSPSSLSASVGDRVTITCRASQSVSSAVAWYQQKPGKAPKLLIYSASSLYSGVPSRFSGSRSGTDFTLTISSLQPEDFATYYCQQSSYSLITFGQGTKVEIK

SEQ ID NO: 1020 - protein, 740 aa, Artificial Sequence
  Description of Artificial Sequence: Synthetic polypeptide
MNLLLILTFVAAAVAEFEVQLVESGGGLVQPGGSLRLSCAASGFNIYYSSIHWVRQAPGKGLEWVASIYPYYGYTYYADSVKGRFTISADTSKNTAYLQMNSLRAEDTAVYYCARYYHYGLDYWGQGTLVTVSSGGGGSDIQMTQSPSSLSASVGDRVTITCRASQSVSSAVAWYQQKPGKAPKLLIYSASSLYSGVPSRFSGSRSGTDFTLTISSLQPEDFATYYCQQSYWHSYLITFGQGTKVEIKLEDKTHTKVEPKTSDKTHTCPPCPAPELLGGPSVFLFPPKPKDTLMISRTPEVTCVVVDVSHEDPEVKFNWYVDGVEVHNAKTKPREEQYNSTYRVVSVLTVLHQDWLNGKEYKCKVSNKALPAPIEKTISKAKGQPREPMVFDLPPSREEMTKNQVSLWCMVKGFYPSDIAVEWESNGQPENNYKTTPPVLDSDGSFFLYSKLTVDKSRWQQGNVFSCSVMHEALHNHYTQKSLSLSPGKSGSETPGTSESATPESGGGEVQLVESGGGLVQPGGSLRLSCAASGFNISYSSIHWVRQAPGKGLEWVAYISSYYGYTYYADSVKGRFTISADTSKNTAYLQMNSLRAEDTAVYYCARAHYFPWAGAMDYWGQGTLVTVSSGGGGSDIQMTQSPSSLSASVGDRVTITCRASQSVSSAVAWYQQKPGKAPKLLIYSASSLYSGVPSRFSGSRSGTDFTLTISSLQPEDFATYYCQQYYWPITFGQGTKVEIK

SEQ ID NO: 1021 - protein, 746 aa, Artificial Sequence
  Description of Artificial Sequence: Synthetic polypeptide
MNLLLILTFVAAAVAEFEVQLVESGGGLVQPGGSLRLSCAASGFNIYYSSIHWVRQAPGKGLEWVASIYPYYGYTYYADSVKGRFTISADTSKNTAYLQMNSLRAEDTAVYYCARYYHYGLDYWGQGTLVTVSSGGGGSDIQMTQSPSSLSASVGDRVTITCRASQSVSSAVAWYQQKPGKAPKLLIYSASSLYSGVPSRFSGSRSGTDFTLTISSLQPEDFATYYCQQSYWHSYLITFGQGTKVEIKLEDKTHTKVEPKSSDKTHNCPPCPAPELLGGPSVFLFPPKPKDTLMISRTPEVTCVVVDVSHEDPEVKFNWYVDGVEVHNAKTKPREEQYNSTYRVVSVLTVLHQDWLNGKEYKCKVSNKALPAPIEKTISKAKGQPREPQVYTLPPIRELMTSNQVSLSCAVKGFYPSDIAVEWESNGQPENNYKTTPPVLDSDGSFFLVSKLTVDKSRWQQGNVFSCSVMHEALHNHYTQKSLSLSPGKSGSETPGTSESATPESGGGEVQLVESGGGLVQPGGSLRLSCAASGFNISSYYIHWVRQAPGKGLEWVASIYSSYGYTSYADSVKGRFTISADTSKNTAYLQMNSLRAEDTAVYYCARTVRGSKKPYFSGWAMDYWGQGTLVTVSSGGGGSDIQMTQSPSSLSASVGDRVTITCRASQSVSSAVAWYQQKPGKAPKLLIYSASSLYSGVPSRFSGSRSGTDFTLTISSLQPEDFATYYCQQYSWGPFTFGQGTKVEIK

SEQ ID NO: 1022 - protein, 736 aa, Artificial Sequence
  Description of Artificial Sequence: Synthetic polypeptide
MNLLLILTFVAAAVAEFEVQLVESGGGLVQPGGSLRLSCAASGFNISYSSIHWVRQAPGKGLEWVASIYPSYSSTYYADSVKGRFTISADTSKNTAYLQMNSLRAEDTAVYYCARYYAMDYWGQGTLVTVSSGGGGSDIQMTQSPSSLSASVGDRVTITCRASQSVSSAVAWYQQKPGKAPKLLIYSASSLYSGVPSRFSGSRSGTDFTLTISSLQPEDFATYYCQQAFYYPITFGQGTKVEIKLEDKTHTKVEPKTSDKTHTCPPCPAPELLGGPSVFLFPPKPKDTLMISRTPEVTCVVVDVSHEDPEVKFNWYVDGVEVHNAKTKPREEQYNSTYRVVSVLTVLHQDWLNGKEYKCKVSNKALPAPIEKTISKAKGQPREPMVFDLPPSREEMTKNQVSLWCMVKGFYPSDIAVEWESNGQPENNYKTTPPVLDSDGSFFLYSKLTVDKSRWQQGNVFSCSVMHEALHNHYTQKSLSLSPGKSGSETPGTSESATPESGGGEVQLVESGGGLVQPGGSLRLSCAASGFNISYSSIHWVRQAPGKGLEWVAYISSYYGYTYYADSVKGRFTISADTSKNTAYLQMNSLRAEDTAVYYCARAHYFPWAGAMDYWGQGTLVTVSSGGGGSDIQMTQSPSSLSASVGDRVTITCRASQSVSSAVAWYQQKPGKAPKLLIYSASSLYSGVPSRFSGSRSGTDFTLTISSLQPEDFATYYCQQYYWPITFGQGTKVEIK

SEQ ID NO: 1023 - protein, 742 aa, Artificial Sequence
  Description of Artificial Sequence: Synthetic polypeptide
MNLLLILTFVAAAVAEFEVQLVESGGGLVQPGGSLRLSCAASGFNISYSSIHWVRQAPGKGLEWVASIYPSYSSTYYADSVKGRFTISADTSKNTAYLQMNSLRAEDTAVYYCARYYAMDYWGQGTLVTVSSGGGGSDIQMTQSPSSLSASVGDRVTITCRASQSVSSAVAWYQQKPGKAPKLLIYSASSLYSGVPSRFSGSRSGTDFTLTISSLQPEDFATYYCQQAFYYPITFGQGTKVEIKLEDKTHTKVEPKSSDKTHNCPPCPAPELLGGPSVFLFPPKPKDTLMISRTPEVTCVVVDVSHEDPEVKFNWYVDGVEVHNAKTKPREEQYNSTYRVVSVLTVLHQDWLNGKEYKCKVSNKALPAPIEKTISKAKGQPREPQVYTLPPIRELMTSNQVSLSCAVKGFYPSDIAVEWESNGQPENNYKTTPPVLDSDGSFFLVSKLTVDKSRWQQGNVFSCSVMHEALHNHYTQKSLSLSPGKSGSETPGTSESATPESGGGEVQLVESGGGLVQPGGSLRLSCAASGFNISSYYIHWVRQAPGKGLEWVASIYSSYGYTSYADSVKGRFTISADTSKNTAYLQMNSLRAEDTAVYYCARTVRGSKKPYFSGWAMDYWGQGTLVTVSSGGGGSDIQMTQSPSSLSASVGDRVTITCRASQSVSSAVAWYQQKPGKAPKLLIYSASSLYSGVPSRFSGSRSGTDFTLTISSLQPEDFATYYCQQYSWGPFTFGQGTKVEIK

SEQ ID NO: 1024 - protein, 739 aa, Artificial Sequence
  Description of Artificial Sequence: Synthetic polypeptide
MNLLLILTFVAAAVAEFEVQLVESGGGLVQPGGSLRLSCAASGFNISSSSMHWVRQAPGKGLEWVASIYSYYGSTYYADSVKGRFTISADTSKNTAYLQMNSLRAEDTAVYYCARWYGMDYWGQGTLVTVSSGGGGSDIQMTQSPSSLSASVGDRVTITCRASQSVSSAVAWYQQKPGKAPKLLIYSASSLYSGVPSRFSGSRSGTDFTLTISSLQPEDFATYYCQQPGSWYFPPITFGQGTKVEIKLEDKTHTKVEPKTSDKTHTCPPCPAPELLGGPSVFLFPPKPKDTLMISRTPEVTCVVVDVSHEDPEVKFNWYVDGVEVHNAKTKPREEQYNSTYRVVSVLTVLHQDWLNGKEYKCKVSNKALPAPIEKTISKAKGQPREPMVFDLPPSREEMTKNQVSLWCMVKGFYPSDIAVEWESNGQPENNYKTTPPVLDSDGSFFLYSKLTVDKSRWQQGNVFSCSVMHEALHNHYTQKSLSLSPGKSGSETPGTSESATPESGGGEVQLVESGGGLVQPGGSLRLSCAASGFNISYSSIHWVRQAPGKGLEWVAYISSYYGYTYYADSVKGRFTISADTSKNTAYLQMNSLRAEDTAVYYCARAHYFPWAGAMDYWGQGTLVTVSSGGGGSDIQMTQSPSSLSASVGDRVTITCRASQSVSSAVAWYQQKPGKAPKLLIYSASSLYSGVPSRFSGSRSGTDFTLTISSLQPEDFATYYCQQYYWPITFGQGTKVEIK

SEQ ID NO: 1025 - protein, 745 aa, Artificial Sequence
  Description of Artificial Sequence: Synthetic polypeptide
MNLLLILTFVAAAVAEFEVQLVESGGGLVQPGGSLRLSCAASGFNISSSSMHWVRQAPGKGLEWVASIYSYYGSTYYADSVKGRFTISADTSKNTAYLQMNSLRAEDTAVYYCARWYGMDYWGQGTLVTVSSGGGGSDIQMTQSPSSLSASVGDRVTITCRASQSVSSAVAWYQQKPGKAPKLLIYSASSLYSGVPSRFSGSRSGTDFTLTISSLQPEDFATYYCQQPGSWYFPPITFGQGTKVEIKLEDKTHTKVEPKSSDKTHNCPPCPAPELLGGPSVFLFPPKPKDTLMISRTPEVTCVVVDVSHEDPEVKFNWYVDGVEVHNAKTKPREEQYNSTYRVVSVLTVLHQDWLNGKEYKCKVSNKALPAPIEKTISKAKGQPREPQVYTLPPIRELMTSNQVSLSCAVKGFYPSDIAVEWESNGQPENNYKTTPPVLDSDGSFFLVSKLTVDKSRWQQGNVFSCSVMHEALHNHYTQKSLSLSPGKSGSETPGTSESATPESGGGEVQLVESGGGLVQPGGSLRLSCAASGFNISSYYIHWVRQAPGKGLEWVASIYSSYGYTSYADSVKGRFTISADTSKNTAYLQMNSLRAEDTAVYYCARTVRGSKKPYFSGWAMDYWGQGTLVTVSSGGGGSDIQMTQSPSSLSASVGDRVTITCRASQSVSSAVAWYQQKPGKAPKLLIYSASSLYSGVPSRFSGSRSGTDFTLTISSLQPEDFATYYCQQYSWGPFTFGQGTKVEIK

SEQ ID NO: 1026 - protein, 740 aa, Artificial Sequence; identical to SEQ ID NO: 995
  Description of Artificial Sequence: Synthetic polypeptide

SEQ ID NO: 1027 - protein, 746 aa, Artificial Sequence; identical to SEQ ID NO: 994
  Description of Artificial Sequence: Synthetic polypeptide

SEQ ID NO: 1028 - protein, 746 aa, Artificial Sequence
  Description of Artificial Sequence: Synthetic polypeptide
MNLLLILTFVAAAVAEFEVQLVESGGGLVQPGGSLRLSCAASGFNISYYYIHWVRQAPGKGLEWVASIYPSSGYTYYADSVKGRFTISADTSKNTAYLQMNSLRAEDTAVYYCARSSFYWAMDYWGQGTLVTVSSGGGGSDIQMTQSPSSLSASVGDRVTITCRASQSVSSAVAWYQQKPGKAPKLLIYSASSLYSGVPSRFSGSRSGTDFTLTISSLQPEDFATYYCQQSYAAYLFTFGQGTKVEIKLEDKTHTKVEPKSSDKTHNCPPCPAPELLGGPSVFLFPPKPKDTLMISRTPEVTCVVVDVSHEDPEVKFNWYVDGVEVHNAKTKPREEQYNSTYRVVSVLTVLHQDWLNGKEYKCKVSNKALPAPIEKTISKAKGQPREPQVYTLPPIRELMTSNQVSLSCAVKGFYPSDIAVEWESNGQPENNYKTTPPVLDSDGSFFLVSKLTVDKSRWQQGNVFSCSVMHEALHNHYTQKSLSLSPGKSGSETPGTSESATPESGGGEVQLVESGGGLVQPGGSLRLSCAASGFNISSYYIHWVRQAPGKGLEWVASIYSSYGYTSYADSVKGRFTISADTSKNTAYLQMNSLRAEDTAVYYCARTVRGSKKPYFSGWAMDYWGQGTLVTVSSGGGGSDIQMTQSPSSLSASVGDRVTITCRASQSVSSAVAWYQQKPGKAPKLLIYSASSLYSGVPSRFSGSRSGTDFTLTISSLQPEDFATYYCQQYSWGPFTFGQGTKVEIK

SEQ ID NO: 1029 - protein, 740 aa, Artificial Sequence
  Description of Artificial Sequence: Synthetic polypeptide
MNLLLILTFVAAAVAEFEVQLVESGGGLVQPGGSLRLSCAASGFNISYYYIHWVRQAPGKGLEWVASIYPSSGYTYYADSVKGRFTISADTSKNTAYLQMNSLRAEDTAVYYCARSSFYWAMDYWGQGTLVTVSSGGGGSDIQMTQSPSSLSASVGDRVTITCRASQSVSSAVAWYQQKPGKAPKLLIYSASSLYSGVPSRFSGSRSGTDFTLTISSLQPEDFATYYCQQSYAAYLFTFGQGTKVEIKLEDKTHTKVEPKTSDKTHTCPPCPAPELLGGPSVFLFPPKPKDTLMISRTPEVTCVVVDVSHEDPEVKFNWYVDGVEVHNAKTKPREEQYNSTYRVVSVLTVLHQDWLNGKEYKCKVSNKALPAPIEKTISKAKGQPREPMVFDLPPSREEMTKNQVSLWCMVKGFYPSDIAVEWESNGQPENNYKTTPPVLDSDGSFFLYSKLTVDKSRWQQGNVFSCSVMHEALHNHYTQKSLSLSPGKSGSETPGTSESATPESGGGEVQLVESGGGLVQPGGSLRLSCAASGFNISYSSIHWVRQAPGKGLEWVAYISSYYGYTYYADSVKGRFTISADTSKNTAYLQMNSLRAEDTAVYYCARAHYFPWAGAMDYWGQGTLVTVSSGGGGSDIQMTQSPSSLSASVGDRVTITCRASQSVSSAVAWYQQKPGKAPKLLIYSASSLYSGVPSRFSGSRSGTDFTLTISSLQPEDFATYYCQQYYWPITFGQGTKVEIK

SEQ ID NO: 1030 - DNA, 2154 bp, Artificial Sequence
  Synthetic nucleotide
atgggatggtcatgtatcatcctttttctggtagcaactgcaactggagtacatagcgaagttcagctcgtggagtccggtggaggcctggtgcaacctggaggctctctgcggctcagttgtgctgctagtggattcacactgagctcatactctatgcattgggtcagacaagctcctggcaaggggctggaatgggtagcctacattagctcatatgacagtatcactgactatgcggattctgtgaaaggcagattcaccatctccgctgatacctctaagaacacagcctacttgcaaatgaattctttgagggctgaggacaccgccgtctattactgcgcccgccctgccgtcggccacatggcctttgattattggggccagggcaccctggtgacagttagttccgctagcaccaagggcccatcggtcttccccctggcaccctcctccaagagcacctctgggggcacagcggccctgggctgcctggtcaaggactacttccccgaaccggtgacggtgtcgtggaactcaggcgccctgaccagcggcgtgcacaccttcccggccgtcctacagtcctcaggactctactccctcagcagcgtggtgaccgtgccctccagcagcttgggcacccagacctacatctgcaacgtgaatcacaagcccagcaacaccaaggtggacaagaaggttgagcccaaatcttgtgacaaaactcacacatgcccaccgtgcccagcacctgaactcctggggggaccgtcagtcttcctcttccccccaaaacccaaggacaccctcatgatctcccggacccctgaggtcacatgcgtggtggtggccgtgagccacgaagaccctgaggtcaagttcaactggtacgtggacggcgtggaggtgcataatgccaagacaaagccgcgggaggagcagtacggcagcacgtaccgtgtggtcagcgtcctcaccgtcctgcaccaggactggctgaatggcaaggagtacaagtgcaaggtctccaacaaagccctcccagcccccatcgagaaaaccatctccaaagccaaagggcagccccgagaaccacaggtgtacaccctgcccccaatccgggagctgatgacctccaaccaggtcagcctgagctgcgccgtcaaaggcttctatcccagcgacatcgccgtggagtgggagagcaatgggcagccggagaacaactacaagaccacgcctcccgtgctggactccgacggctccttcttcctcgtgagcaagctcaccgtggacaagagcaggtggcagcaggggaacgtcttctcatgctccgtgatgcatgaggctctgcacaaccactacacgcagaagagcctctccctgtctccgggcaaaggtggaggcagtggtggaggatctggcggtggcagtggcggtggtagcgggtccacgggggaggtccaattggtggaatctggtggcggtttagtccaaccgggtggctccctccggctgtcctgcgctgctagtggcttcgattttagctcctcttctatccactgggtcagacaggctcctggcaagggtctcgaatgggtggcctctatctcctcttcctacggatatacctattatgctgactctgttaaaggccgctttaccatctctgccgataccagcaagaacacagcttatctgcaaatgaattctctccgcgccgaggacactgccgtctactactgcgcacgttcttgggccatggactactggggccagggcaccctggtgacagtctcctctggaggtggcggctccgacatccagatgactcagagcccaagctccttgtccgcatctgttggcgatcgagtgaccattacctgccgggctagccagtctgtatcttctgccgtggcctggtaccagcaaaagccaggcaaggctcccaaactgctgatttatagtgcttctgatctgtactccggcgttccatctcgatttagcgggtcccgctccggaaccgatttcacactcacaatttccagtctccagcctgaggacttcgccacatactactgccaacaatacgcgggtgccgggctgatcacctttggacaagggacaaaggtggagatcaaataatag

SEQ ID NO: 1031 - DNA, 2154 bp, Artificial Sequence
  Synthetic polynucleotide
atgggatggtcatgtatcatcctttttctggtagcaactgcaactggagtacatagcgaagttcagctcgtggagtccggtggaggcctggtgcaacctggaggctctctgcggctcagttgtgctgctagtggattcacactgagctcatactctatgcattgggtcagacaagctcctggcaaggggctggaatgggtagcctacattagctcatatgacagtatcactgactatgcggattctgtgaaaggcagattcaccatctccgctgatacctctaagaacacagcctacttgcaaatgaattctttgagggctgaggacaccgccgtctattactgcgcccgccctgccgtcggccacatggcctttgattattggggccagggcaccctggtgacagttagttccgctagcaccaagggcccatcggtcttccccctggcaccctcctccaagagcacctctgggggcacagcggccctgggctgcctggtcaaggactacttccccgaaccggtgacggtgtcgtggaactcaggcgccctgaccagcggcgtgcacaccttcccggccgtcctacagtcctcaggactctactccctcagcagcgtggtgaccgtgccctccagcagcttgggcacccagacctacatctgcaacgtgaatcacaagcccagcaacaccaaggtggacaagaaggttgagcccaaatcttgtgacaaaactcacacatgcccaccgtgcccagcacctgaagccgccgggggaccgtcagtcttcctcttccccccaaaacccaaggacaccctcatgatctcccggacccctgaggtcacatgcgtggtggtggacgtgagccacgaagaccctgaggtcaagttcaactggtacgtggacggcgtggaggtgcataatgccaagacaaagccgcgggaggagcagtacaacagcacgtaccgtgtggtcagcgtcctcaccgtcctgcaccaggactggctgaatggcaaggagtacaagtgcaaggtctccaacaaagccctcccagcctccatcgagaaaaccatctccaaagccaaagggcagccccgagaaccacaggtgtacaccctgcccccaatccgggagctgatgacctccaaccaggtcagcctgagctgcgccgtcaaaggcttctatcccagcgacatcgccgtggagtgggagagcaatgggcagccggagaacaactacaagaccacgcctcccgtgctggactccgacggctccttcttcctcgtgagcaagctcaccgtggacaagagcaggtggcagcaggggaacgtcttctcatgctccgtgatgcatgaggctctgcacaaccactacacgcagaagagcctctccctgtctccgggcaaaggtggaggcagtggtggaggatctggcggtggcagtggcggtggtagcgggtccacgggggaggtccaattggtggaatctggtggcggtttagtccaaccgggtggctccctccggctgtcctgcgctgctagtggcttcgattttagctcctcttctatccactgggtcagacaggctcctggcaagggtctcgaatgggtggcctctatctcctcttcctacggatatacctattatgctgactctgttaaaggccgctttaccatctctgccgataccagcaagaacacagcttatctgcaaatgaattctctccgcgccgaggacactgccgtctactactgcgcacgttcttgggccatggactactggggccagggcaccctggtgacagtctcctctggaggtggcggctccgacatccagatgactcagagcccaagctccttgtccgcatctgttggcgatcgagtgaccattacctgccgggctagccagtctgtatcttctgccgtggcctggtaccagcaaaagccaggcaaggctcccaaactgctgatttatagtgcttctgatctgtactccggcgttccatctcgatttagcgggtcccgctccggaaccgatttcacactcacaatttccagtctccagcctgaggacttcgccacatactactgccaacaatacgcgggtgccgggctgatcacctttggacaagggacaaaggtggagatcaaataatag

SEQ ID NO: 1032 - DNA, 2154 bp, Artificial Sequence
  Synthetic polynucleotide
atgggatggtcatgtatcatcctttttctggtagcaactgcaactggagtacatagcgaagttcagctcgtggagtccggtggaggcctggtgcaacctggaggctctctgcggctcagttgtgctgctagtggattcacactgagctcatactctatgcattgggtcagacaagctcctggcaaggggctggaatgggtagcctacattagctcatatgacagtatcactgactatgcggattctgtgaaaggcagattcaccatctccgctgatacctctaagaacacagcctacttgcaaatgaattctttgagggctgaggacaccgccgtctattactgcgcccgccctgccgtcggccacatggcctttgattattggggccagggcaccctggtgacagttagttccgctagcaccaagggcccatcggtcttccccctggcaccctcctccaagagcacctctgggggcacagcggccctgggctgcctggtcaaggactacttccccgaaccggtgacggtgtcgtggaactcaggcgccctgaccagcggcgtgcacaccttcccggccgtcctacagtcctcaggactctactccctcagcagcgtggtgaccgtgccctccagcagcttgggcacccagacctacatctgcaacgtgaatcacaagcccagcaacaccaaggtggacaagaaggttgagcccaaatcttgtgacaaaactcacacatgcccaccgtgcccagcacctgaagccgccgggggaccgtcagtcttcctcttccccccaaaacccaaggacaccctcatgatctcccggacccctgaggtcacatgcgtggtggtggacgtgagccacgaagaccctgaggtcaagttcaactggtacgtggacggcgtggaggtgcataatgccaagacaaagccgcgggaggagcagtacaacagcacgtaccgtgtggtcagcgtcctcaccgtcctgcaccaggactggctgaatggcaaggagtacaagtgcaaggtctccaacaaagccctcccagcctccatcgagaaaaccatctccaaagccaaagggcagccccgagaaccacaggtgtacaccctgcccccatcccgggaggagatgaccaagaaccaggtcagcctgagctgcgccgtcaaaggcttctatcccagcgacatcgccgtggagtgggagagcaatgggcagccggagaacaactacaagaccacgcctcccgtgctggactccgacggctccttcttcctcgtgagcaagctcaccgtggacaagagcaggtggcagcaggggaacgtcttctcatgctccgtgatgcatgaggctctgcacaaccactacacgcagaagagcctctccctgtctccgggcaaaggtggaggcagtggtggaggatctggcggtggcagtggcggtggtagcgggtccacgggggaggtccaattggtggaatctggtggcggtttagtccaaccgggtggctccctccggctgtcctgcgctgctagtggcttcgattttagctcctcttctatccactgggtcagacaggctcctggcaagggtctcgaatgggtggcctctatctcctcttcctacggatatacctattatgctgactctgttaaaggccgctttaccatctctgccgataccagcaagaacacagcttatctgcaaatgaattctctccgcgccgaggacactgccgtctactactgcgcacgttcttgggccatggactactggggccagggcaccctggtgacagtctcctctggaggtggcggctccgacatccagatgactcagagcccaagctccttgtccgcatctgttggcgatcgagtgaccattacctgccgggctagccagtctgtatcttctgccgtggcctggtaccagcaaaagccaggcaaggctcccaaactgctgatttatagtgcttctgatctgtactccggcgttccatctcgatttagcgggtcccgctccggaaccgatttcacactcacaatttccagtctccagcctgaggacttcgccacatactactgccaacaatacgcgggtgccgggctgatcacctttggacaagggacaaaggtggagatcaaataatag

SEQ ID NO: 1033 - DNA, 2154 bp, Artificial Sequence
  Synthetic polynucleotide
atgggatggtcatgtatcatcctttttctggtagcaactgcaactggagtacatagcgaagttcagctcgtggagtccggtggaggcctggtgcaacctggaggctctctgcggctcagttgtgctgctagtggattcacactgagctcatactctatgcattgggtcagacaagctcctggcaaggggctggaatgggtagcctacattagctcatatgacagtatcactgactatgcggattctgtgaaaggcagattcaccatctccgctgatacctctaagaacacagcctacttgcaaatgaattctttgagggctgaggacaccgccgtctattactgcgcccgccctgccgtcggccacatggcctttgattattggggccagggcaccctggtgacagttagttccgctagcaccaagggcccatcggtcttccccctggcaccctcctccaagagcacctctgggggcacagcggccctgggctgcctggtcaaggactacttccccgaaccggtgacggtgtcgtggaactcaggcgccctgaccagcggcgtgcacaccttcccggccgtcctacagtcctcaggactctactccctcagcagcgtggtgaccgtgccctccagcagcttgggcacccagacctacatctgcaacgtgaatcacaagcccagcaacaccaaggtggacaagaaggttgagcccaaatcttgtgacaaaactcacacatgcccaccgtgcccagcacctgaagccgccgggggaccgtcagtcttcctcttccccccaaaacccaaggacaccctcatgatctcccggacccctgaggtcacatgcgtggtggtggacgtgagccacgaagaccctgaggtcaagttcaactggtacgtggacggcgtggaggtgcataatgccaagacaaagccgcgggaggagcagtacaacagcacgtaccgtgtggtcagcgtcctcaccgtcctgcaccaggactggctgaatggcaaggagtacaagtgcaaggtctccaacaaagccctcccagcctccatcgagaaaaccatctccaaagccaaagggcagccccgagaaccacaggtgtgcaccctgcccccatcccgggaggagatgaccaagaaccaggtcagcctgagctgcgccgtcaaaggcttctatcccagcgacatcgccgtggagtgggagagcaatgggcagccggagaacaactacaagaccacgcctcccgtgctggactccgacggctccttcttcctcgtgagcaagctcaccgtggacaagagcaggtggcagcaggggaacgtcttctcatgctccgtgatgcatgaggctctgcacaaccactacacgcagaagagcctctccctgtctccgggcaaaggtggaggcagtggtggaggatctggcggtggcagtggcggtggtagcgggtccacgggggaggtccaattggtggaatctggtggcggtttagtccaaccgggtggctccctccggctgtcctgcgctgctagtggcttcgattttagctcctcttctatccactgggtcagacaggctcctggcaagggtctcgaatgggtggcctctatctcctcttcctacggatatacctattatgctgactctgttaaaggccgctttaccatctctgccgataccagcaagaacacagcttatctgcaaatgaattctctccgcgccgaggacactgccgtctactactgcgcacgttcttgggccatggactactggggccagggcaccctggtgacagtctcctctggaggtggcggctccgacatccagatgactcagagcccaagctccttgtccgcatctgttggcgatcgagtgaccattacctgccgggctagccagtctgtatcttctgccgtggcctggtaccagcaaaagccaggcaaggctcccaaactgctgatttatagtgcttctgatctgtactccggcgttccatctcgatttagcgggtcccgctccggaaccgatttcacactcacaatttccagtctccagcctgaggacttcgccacatactactgccaacaatacgcgggtgccgggctgatcacctttggacaagggacaaaggtggagatcaaataatag

SEQ ID NO: 1034 - DNA, 2097 bp, Artificial Sequence
  Synthetic polynucleotide
gaagttcagctcgtggagtccggtggaggcctggtgcaacctggaggctctctgcggctcagttgtgctgctagtggattcacactgagctcatactctatgcattgggtcagacaagctcctggcaaggggctggaatgggtagcctacattagctcatatgacagtatcactgactatgcggattctgtgaaaggcagattcaccatctccgctgatacctctaagaacacagcctacttgcaaatgaattctttgagggctgaggacaccgccgtctattactgcgcccgccctgccgtcggccacatggcctttgattattggggccagggcaccctggtgacagttagttccgctagcaccaagggcccatcggtcttccccctggcaccctcctccaagagcacctctgggggcacagcggccctgggctgcctggtcaaggactacttccccgaaccggtgacggtgtcgtggaactcaggcgccctgaccagcggcgtgcacaccttcccggccgtcctacagtcctcaggactctactccctcagcagcgtggtgaccgtgccctccagcagcttgggcacccagacctacatctgcaacgtgaatcacaagcccagcaacaccaaggtggacaagaaggttgagcccaaatcttgtgacaaaactcacacatgcccaccgtgcccagcacctgaactcctggggggaccgtcagtcttcctcttccccccaaaacccaaggacaccctcatgatctcccggacccctgaggtcacatgcgtggtggtggccgtgagccacgaagaccctgaggtcaagttcaactggtacgtggacggcgtggaggtgcataatgccaagacaaagccgcgggaggagcagtacggcagcacgtaccgtgtggtcagcgtcctcaccgtcctgcaccaggactggctgaatggcaaggagtacaagtgcaaggtctccaacaaagccctcccagcccccatcgagaaaaccatctccaaagccaaagggcagccccgagaaccacaggtgtacaccctgcccccaatccgggagctgatgacctccaaccaggtcagcctgagctgcgccgtcaaaggcttctatcccagcgacatcgccgtggagtgggagagcaatgggcagccggagaacaactacaagaccacgcctcccgtgctggactccgacggctccttcttcctcgtgagcaagctcaccgtggacaagagcaggtggcagcaggggaacgtcttctcatgctccgtgatgcatgaggctctgcacaaccactacacgcagaagagcctctccctgtctccgggcaaaggtggaggcagtggtggaggatctggcggtggcagtggcggtggtagcgggtccacgggggaggtccaattggtggaatctggtggcggtttagtccaaccgggtggctccctccggctgtcctgcgctgctagtggcttcgattttagctcctcttctatccactgggtcagacaggctcctggcaagggtctcgaatgggtggcctctatctcctcttcctacggatatacctattatgctgactctgttaaaggccgctttaccatctctgccgataccagcaagaacacagcttatctgcaaatgaattctctccgcgccgaggacactgccgtctactactgcgcacgttcttgggccatggactactggggccagggcaccctggtgacagtctcctctggaggtggcggctccgacatccagatgactcagagcccaagctccttgtccgcatctgttggcgatcgagtgaccattacctgccgggctagccagtctgtatcttctgccgtggcctggtaccagcaaaagccaggcaaggctcccaaactgctgatttatagtgcttctgatctgtactccggcgttccatctcgatttagcgggtcccgctccggaaccgatttcacactcacaatttccagtctccagcctgaggacttcgccacatactactgccaacaatacgcgggtgccgggctgatcacctttggacaagggacaaaggtggagatcaaataatag

SEQ ID NO: 1035 - DNA, 2097 bp, Artificial Sequence
  Synthetic polynucleotide
gaagttcagctcgtggagtccggtggaggcctggtgcaacctggaggctctctgcggctcagttgtgctgctagtggattcacactgagctcatactctatgcattgggtcagacaagctcctggcaaggggctggaatgggtagcctacattagctcatatgacagtatcactgactatgcggattctgtgaaaggcagattcaccatctccgctgatacctctaagaacacagcctacttgcaaatgaattctttgagggctgaggacaccgccgtctattactgcgcccgccctgccgtcggccacatggcctttgattattggggccagggcaccctggtgacagttagttccgctagcaccaagggcccatcggtcttccccctggcaccctcctccaagagcacctctgggggcacagcggccctgggctgcctggtcaaggactacttccccgaaccggtgacggtgtcgtggaactcaggcgccctgaccagcggcgtgcacaccttcccggccgtcctacagtcctcaggactctactccctcagcagcgtggtgaccgtgccctccagcagcttgggcacccagacctacatctgcaacgtgaatcacaagcccagcaacaccaaggtggacaagaaggttgagcccaaatcttgtgacaaaactcacacatgcccaccgtgcccagcacctgaagccgccgggggaccgtcagtcttcctcttccccccaaaacccaaggacaccctcatgatctcccggacccctgaggtcacatgcgtggtggtggacgtgagccacgaagaccctgaggtcaagttcaactggtacgtggacggcgtggaggtgcataatgccaagacaaagccgcgggaggagcagtacaacagcacgtaccgtgtggtcagcgtcctcaccgtcctgcaccaggactggctgaatggcaaggagtacaagtgcaaggtctccaacaaagccctcccagcctccatcgagaaaaccatctccaaagccaaagggcagccccgagaaccacaggtgtacaccctgcccccaatccgggagctgatgacctccaaccaggtcagcctgagctgcgccgtcaaaggcttctatcccagcgacatcgccgtggagtgggagagcaatgggcagccggagaacaactacaagaccacgcctcccgtgctggactccgacggctccttcttcctcgtgagcaagctcaccgtggacaagagcaggtggcagcaggggaacgtcttctcatgctccgtgatgcatgaggctctgcacaaccactacacgcagaagagcctctccctgtctccgggcaaaggtggaggcagtggtggaggatctggcggtggcagtggcggtggtagcgggtccacgggggaggtccaattggtggaatctggtggcggtttagtccaaccgggtggctccctccggctgtcctgcgctgctagtggcttcgattttagctcctcttctatccactgggtcagacaggctcctggcaagggtctcgaatgggtggcctctatctcctcttcctacggatatacctattatgctgactctgttaaaggccgctttaccatctctgccgataccagcaagaacacagcttatctgcaaatgaattctctccgcgccgaggacactgccgtctactactgcgcacgttcttgggccatggactactggggccagggcaccctggtgacagtctcctctggaggtggcggctccgacatccagatgactcagagcccaagctccttgtccgcatctgttggcgatcgagtgaccattacctgccgggctagccagtctgtatcttctgccgtggcctggtaccagcaaaagccaggcaaggctcccaaactgctgatttatagtgcttctgatctgtactccggcgttccatctcgatttagcgggtcccgctccggaaccgatttcacactcacaatttccagtctccagcctgaggacttcgccacatactactgccaacaatacgcgggtgccgggctgatcacctttggacaagggacaaaggtggagatcaaataatag

SEQ ID NO: 1036 - DNA, 2097 bp, Artificial Sequence
  Synthetic polynucleotide
gaagttcagctcgtggagtccggtggaggcctggtgcaacctggaggctctctgcggctcagttgtgctgctagtggattcacactgagctcatactctatgcattgggtcagacaagctcctggcaaggggctggaatgggtagcctacattagctcatatgacagtatcactgactatgcggattctgtgaaaggcagattcaccatctccgctgatacctctaagaacacagcctacttgcaaatgaattctttgagggctgaggacaccgccgtctattactgcgcccgccctgccgtcggccacatggcctttgattattggggccagggcaccctggtgacagttagttccgctagcaccaagggcccatcggtcttccccctggcaccctcctccaagagcacctctgggggcacagcggccctgggctgcctggtcaaggactacttccccgaaccggtgacggtgtcgtggaactcaggcgccctgaccagcggcgtgcacaccttcccggccgtcctacagtcctcaggactctactccctcagcagcgtggtgaccgtgccctccagcagcttgggcacccagacctacatctgcaacgtgaatcacaagcccagcaacaccaaggtggacaagaaggttgagcccaaatcttgtgacaaaactcacacatgcccaccgtgcccagcacctgaagccgccgggggaccgtcagtcttcctcttccccccaaaacccaaggacaccctcatgatctcccggacccctgaggtcacatgcgtggtggtggacgtgagccacgaagaccctgaggtcaagttcaactggtacgtggacggcgtggaggtgcataatgccaagacaaagccgcgggaggagcagtacaacagcacgtaccgtgtggtcagcgtcctcaccgtcctgcaccaggactggctgaatggcaaggagtacaagtgcaaggtctccaacaaagccctcccagcctccatcgagaaaaccatctccaaagccaaagggcagccccgagaaccacaggtgtacaccctgcccccatcccgggaggagatgaccaagaaccaggtcagcctgagctgcgccgtcaaaggcttctatcccagcgacatcgccgtggagtgggagagcaatgggcagccggagaacaactacaagaccacgcctcccgtgctggactccgacggctccttcttcctcgtgagcaagctcaccgtggacaagagcaggtggcagcaggggaacgtcttctcatgctccgtgatgcatgaggctctgcacaaccactacacgcagaagagcctctccctgtctccgggcaaaggtggaggcagtggtggaggatctggcggtggcagtggcggtggtagcgggtccacgggggaggtccaattggtggaatctggtggcggtttagtccaaccgggtggctccctccggctgtcctgcgctgctagtggcttcgattttagctcctcttctatccactgggtcagacaggctcctggcaagggtctcgaatgggtggcctctatctcctcttcctacggatatacctattatgctgactctgttaaaggccgctttaccatctctgccgataccagcaagaacacagcttatctgcaaatgaattctctccgcgccgaggacactgccgtctactactgcgcacgttcttgggccatggactactggggccagggcaccctggtgacagtctcctctggaggtggcggctccgacatccagatgactcagagcccaagctccttgtccgcatctgttggcgatcgagtgaccattacctgccgggctagccagtctgtatcttctgccgtggcctggtaccagcaaaagccaggcaaggctcccaaactgctgatttatagtgcttctgatctgtactccggcgttccatctcgatttagcgggtcccgctccggaaccgatttcacactcacaatttccagtctccagcctgaggacttcgccacatactactgccaacaatacgcgggtgccgggctgatcacctttggacaagggacaaaggtggagatcaaataatag

SEQ ID NO: 1037 - DNA, 2097 bp, Artificial Sequence
  Synthetic polynucleotide
gaagttcagctcgtggagtccggtggaggcctggtgcaacctggaggctctctgcggctcagttgtgctgctagtggattcacactgagctcatactctatgcattgggtcagacaagctcctggcaaggggctggaatgggtagcctacattagctcatatgacagtatcactgactatgcggattctgtgaaaggcagattcaccatctccgctgatacctctaagaacacagcctacttgcaaatgaattctttgagggctgaggacaccgccgtctattactgcgcccgccctgccgtcggccacatggcctttgattattggggccagggcaccctggtgacagttagttccgctagcaccaagggcccatcggtcttccccctggcaccctcctccaagagcacctctgggggcacagcggccctgggctgcctggtcaaggactacttccccgaaccggtgacggtgtcgtggaactcaggcgccctgaccagcggcgtgcacaccttcccggccgtcctacagtcctcaggactctactccctcagcagcgtggtgaccgtgccctccagcagcttgggcacccagacctacatctgcaacgtgaatcacaagcccagcaacaccaaggtggacaagaaggttgagcccaaatcttgtgacaaaactcacacatgcccaccgtgcccagcacctgaagccgccgggggaccgtcagtcttcctcttccccccaaaacccaaggacaccctcatgatctcccggacccctgaggtcacatgcgtggtggtggacgtgagccacgaagaccctgaggtcaagttcaactggtacgtggacggcgtggaggtgcataatgccaagacaaagccgcgggaggagcagtacaacagcacgtaccgtgtggtcagcgtcctcaccgtcctgcaccaggactggctgaatggcaaggagtacaagtgcaaggtctccaacaaagccctcccagcctccatcgagaaaaccatctccaaagccaaagggcagccccgagaaccacaggtgtgcaccctgcccccatcccgggaggagatgaccaagaaccaggtcagcctgagctgcgccgtcaaaggcttctatcccagcgacatcgccgtggagtgggagagcaatgggcagccggagaacaactacaagaccacgcctcccgtgctggactccgacggctccttcttcctcgtgagcaagctcaccgtggacaagagcaggtggcagcaggggaacgtcttctcatgctccgtgatgcatgaggctctgcacaaccactacacgcagaagagcctctccctgtctccgggcaaaggtggaggcagtggtggaggatctggcggtggcagtggcggtggtagcgggtccacgggggaggtccaattggtggaatctggtggcggtttagtccaaccgggtggctccctccggctgtcctgcgctgctagtggcttcgattttagctcctcttctatccactgggtcagacaggctcctggcaagggtctcgaatgggtggcctctatctcctcttcctacggatatacctattatgctgactctgttaaaggccgctttaccatctctgccgataccagcaagaacacagcttatctgcaaatgaattctctccgcgccgaggacactgccgtctactactgcgcacgttcttgggccatggactactggggccagggcaccctggtgacagtctcctctggaggtggcggctccgacatccagatgactcagagcccaagctccttgtccgcatctgttggcgatcgagtgaccattacctgccgggctagccagtctgtatcttctgccgtggcctggtaccagcaaaagccaggcaaggctcccaaactgctgatttatagtgcttctgatctgtactccggcgttccatctcgatttagcgggtcccgctccggaaccgatttcacactcacaatttccagtctccagcctgaggacttcgccacatactactgccaacaatacgcgggtgccgggctgatcacctttggacaagggacaaaggtggagatcaaataatag

SEQ ID NO: 1038 - DNA, 2166 bp, Artificial Sequence
  Synthetic polynucleotide
atgggatggtcatgtatcatcctttttctggtagcaactgcaactggagtacatagcgaagtgcagttggtggagtctggcggtggcttggtccaaccgggtggcagcctgaggctgagctgtgccgcaagtggcttcacactaagttcttactccatgcattgggttaggcaagctcctggcaagggtctggaatgggtagcctacatctcttcctatgattcaattactgactacgcggacagtgtcaaggggagattcacgataagtgccgacacctccaagaacacagcttacttgcaaatgaatagcctgcgagctgaggacacagctgtttactactgtgctaggccagccgttgggcacatggcctttgattattggggccagggcaccctggtgacagttagttctgctagcaccaagggcccatcggtcttccccctggcaccctcctccaagagcacctctgggggcacagcggccctgggctgcctggtcaaggactacttccccgaaccggtgacggtgtcgtggaactcaggcgccctgaccagcggcgtgcacaccttcccggccgtcctacagtcctcaggactctactccctcagcagcgtggtgaccgtgccctccagcagcttgggcacccagacctacatctgcaacgtgaatcacaagcccagcaacaccaaggtggacaagaaggttgagcccaaatcttgtgacaaaactcacacatgcccaccgtgcccagcacctgaactcctggggggaccgtcagtcttcctcttccccccaaaacccaaggacaccctcatgatctcccggacccctgaggtcacatgcgtggtggtggccgtgagccacgaagaccctgaggtcaagttcaactggtacgtggacggcgtggaggtgcataatgccaagacaaagccgcgggaggagcagtacggcagcacgtaccgtgtggtcagcgtcctcaccgtcctgcaccaggactggctgaatggcaaggagtacaagtgcaaggtctccaacaaagccctcccagcccccatcgagaaaaccatctccaaagccaaagggcagccccgagaaccaatggtgttcgacctgcccccatcccgggaggagatgaccaagaaccaggtcagcctgtggtgcatggtcaaaggcttctatcccagcgacatcgccgtggagtgggagagcaatgggcagccggagaacaactacaagaccacgcctcccgtgctggactccgacggctccttcttcctctacagcaagctcaccgtggacaagagcaggtggcagcaggggaacgtcttctcatgctccgtgatgcatgaggctctgcacaaccactacacgcagaagagcctctccctgtctccgggcaaaggtggaggctccggcggtggctctggcggcggttctggcggtggttctggtagcacgggcgaagtccaattggtggagagtggtggcggactagtgcaacccggcggctccttgcgactcagctgcgctgctagcggttttgactttactgcctacgccatgcactgggttaggcaggctcccggcaagggcctggaatgggttgcctctatctatcctagtggcggctataccgcctatgccgactctgtcaagggccgattcaccattagtgctgacacttccaagaacacagcttatctgcaaatgaacagtttacgtgctgaggacaccgccgtgtactattgcgcgaggcgcagttactatttcgccctggattactggggccagggcacactggtgacagtgtctagcggaggtggtggcagcgatattcagatgacacagagccccagttccctgtccgcatccgttggagaccgcgtcaccatcacctgccgggccagtcagtctgtctcaagtgctgttgcatggtaccaacaaaagcctggcaaagcacctaagctcctgatctattccgcctcttccctgtactctggagttccttctaggtttagtggcagccggagtggcaccgacttcacattgactattagctctttgcaaccggaggatttcgctacctactactgtcaacaatactgggcgtattattcgcccatcacattcgggcaaggcacaaaggtcgagatcaagtaatag

SEQ ID NO: 1039 - DNA, 2166 bp, Artificial Sequence
  Synthetic polynucleotide
atgggatggtcatgtatcatcctttttctggtagcaactgcaactggagtacatagcgaagtgcagttggtggagtctggcggtggcttggtccaaccgggtggcagcctgaggctgagctgtgccgcaagtggcttcacactaagttcttactccatgcattgggttaggcaagctcctggcaagggtctggaatgggtagcctacatctcttcctatgattcaattactgactacgcggacagtgtcaaggggagattcacgataagtgccgacacctccaagaacacagcttacttgcaaatgaatagcctgcgagctgaggacacagctgtttactactgtgctaggccagccgttgggcacatggcctttgattattggggccagggcaccctggtgacagttagttctgctagcaccaagggcccatcggtcttccccctggcaccctcctccaagagcacctctgggggcacagcggccctgggctgcctggtcaaggactacttccccgaaccggtgacggtgtcgtggaactcaggcgccctgaccagcggcgtgcacaccttcccggccgtcctacagtcctcaggactctactccctcagcagcgtggtgaccgtgccctccagcagcttgggcacccagacctacatctgcaacgtgaatcacaagcccagcaacaccaaggtggacaagaaggttgagcccaaatcttgtgacaaaactcacacatgcccaccgtgcccagcacctgaagccgccgggggaccgtcagtcttcctcttccccccaaaacccaaggacaccctcatgatctcccggacccctgaggtcacatgcgtggtggtggacgtgagccacgaagaccctgaggtcaagttcaactggtacgtggacggcgtggaggtgcataatgccaagacaaagccgcgggaggagcagtacaacagcacgtaccgtgtggtcagcgtcctcaccgtcctgcaccaggactggctgaatggcaaggagtacaagtgcaaggtctccaacaaagccctcccagcctccatcgagaaaaccatctccaaagccaaagggcagccccgagaaccaatggtgttcgacctgcccccatcccgggaggagatgaccaagaaccaggtcagcctgtggtgcatggtcaaaggcttctatcccagcgacatcgccgtggagtgggagagcaatgggcagccggagaacaactacaagaccacgcctcccgtgctggactccgacggctccttcttcctctacagcaagctcaccgtggacaagagcaggtggcagcaggggaacgtcttctcatgctccgtgatgcatgaggctctgcacaaccactacacgcagaagagcctctccctgtctccgggcaaaggtggaggctccggcggtggctctggcggcggttctggcggtggttctggtagcacgggcgaagtccaattggtggagagtggtggcggactagtgcaacccggcggctccttgcgactcagctgcgctgctagcggttttgactttactgcctacgccatgcactgggttaggcaggctcccggcaagggcctggaatgggttgcctctatctatcctagtggcggctataccgcctatgccgactctgtcaagggccgattcaccattagtgctgacacttccaagaacacagcttatctgcaaatgaacagtttacgtgctgaggacaccgccgtgtactattgcgcgaggcgcagttactatttcgccctggattactggggccagggcacactggtgacagtgtctagcggaggtggtggcagcgatattcagatgacacagagccccagttccctgtccgcatccgttggagaccgcgtcaccatcacctgccgggccagtcagtctgtctcaagtgctgttgcatggtaccaacaaaagcctggcaaagcacctaagctcctgatctattccgcctcttccctgtactctggagttccttctaggtttagtggcagccggagtggcaccgacttcacattgactattagctctttgcaaccggaggatttcgctacctactactgtcaacaatactgggcgtattattcgcccatcacattcgggcaaggcacaaaggtcgagatcaagtaatag

SEQ ID NO: 1040 - DNA, 2166 bp, Artificial Sequence
  Synthetic polynucleotide
atgggatggtcatgtatcatcctttttctggtagcaactgcaactggagtacatagcgaagtgcagttggtggagtctggcggtggcttggtccaaccgggtggcagcctgaggctgagctgtgccgcaagtggcttcacactaagttcttactccatgcattgggttaggcaagctcctggcaagggtctggaatgggtagcctacatctcttcctatgattcaattactgactacgcggacagtgtcaaggggagattcacgataagtgccgacacctccaagaacacagcttacttgcaaatgaatagcctgcgagctgaggacacagctgtttactactgtgctaggccagccgttgggcacatggcctttgattattggggccagggcaccctggtgacagttagttctgctagcaccaagggcccatcggtcttccccctggcaccctcctccaagagcacctctgggggcacagcggccctgggctgcctggtcaaggactacttccccgaaccggtgacggtgtcgtggaactcaggcgccctgaccagcggcgtgcacaccttcccggccgtcctacagtcctcaggactctactccctcagcagcgtggtgaccgtgccctccagcagcttgggcacccagacctacatctgcaacgtgaatcacaagcccagcaacaccaaggtggacaagaaggttgagcccaaatcttgtgacaaaactcacacatgcccaccgtgcccagcacctgaagccgccgggggaccgtcagtcttcctcttccccccaaaacccaaggacaccctcatgatctcccggacccctgaggtcacatgcgtggtggtggacgtgagccacgaagaccctgaggtcaagttcaactggtacgtggacggcgtggaggtgcataatgccaagacaaagccgcgggaggagcagtacaacagcacgtaccgtgtggtcagcgtcctcaccgtcctgcaccaggactggctgaatggcaaggagtacaagtgcaaggtctccaacaaagccctcccagcctccatcgagaaaaccatctccaaagccaaagggcagccccgagaaccacaggtgtacaccctgcccccatcccgggaggagatgaccaagaaccaggtcagcctgtggtgcctggtcaaaggcttctatcccagcgacatcgccgtggagtgggagagcaatgggcagccggagaacaactacaagaccacgcctcccgtgctggactccgacggctccttcttcctctacagcaagctcaccgtggacaagagcaggtggcagcaggggaacgtcttctcatgctccgtgatgcatgaggctctgcacaaccactacacgcagaagagcctctccctgtctccgggcaaaggtggaggctccggcggtggctctggcggcggttctggcggtggttctggtagcacgggcgaagtccaattggtggagagtggtggcggactagtgcaacccggcggctccttgcgactcagctgcgctgctagcggttttgactttactgcctacgccatgcactgggttaggcaggctcccggcaagggcctggaatgggttgcctctatctatcctagtggcggctataccgcctatgccgactctgtcaagggccgattcaccattagtgctgacacttccaagaacacagcttatctgcaaatgaacagtttacgtgctgaggacaccgccgtgtactattgcgcgaggcgcagttactatttcgccctggattactggggccagggcacactggtgacagtgtctagcggaggtggtggcagcgatattcagatgacacagagccccagttccctgtccgcatccgttggagaccgcgtcaccatcacctgccgggccagtcagtctgtctcaagtgctgttgcatggtaccaacaaaagcctggcaaagcacctaagctcctgatctattccgcctcttccctgtactctggagttccttctaggtttagtggcagccggagtggcaccgacttcacattgactattagctctttgcaaccggaggatttcgctacctactactgtcaacaatactgggcgtattattcgcccatcacattcgggcaaggcacaaaggtcgagatcaagtaatag

SEQ ID NO: 1041 - DNA, 2166 bp, Artificial Sequence
  Synthetic polynucleotide
atgggatggtcatgtatcatcctttttctggtagcaactgcaactggagtacatagcgaagtgcagttggtggagtctggcggtggcttggtccaaccgggtggcagcctgaggctgagctgtgccgcaagtggcttcacactaagttcttactccatgcattgggttaggcaagctcctggcaagggtctggaatgggtagcctacatctcttcctatgattcaattactgactacgcggacagtgtcaaggggagattcacgataagtgccgacacctccaagaacacagcttacttgcaaatgaatagcctgcgagctgaggacacagctgtttactactgtgctaggccagccgttgggcacatggcctttgattattggggccagggcaccctggtgacagttagttctgctagcaccaagggcccatcggtcttccccctggcaccctcctccaagagcacctctgggggcacagcggccctgggctgcctggtcaaggactacttccccgaaccggtgacggtgtcgtggaactcaggcgccctgaccagcggcgtgcacaccttcccggccgtcctacagtcctcaggactctactccctcagcagcgtggtgaccgtgccctccagcagcttgggcacccagacctacatctgcaacgtgaatcacaagcccagcaacaccaaggtggacaagaaggttgagcccaaatcttgtgacaaaactcacacatgcccaccgtgcccagcacctgaagccgccgggggaccgtcagtcttcctcttccccccaaaacccaaggacaccctcatgatctcccggacccctgaggtcacatgcgtggtggtggacgtgagccacgaagaccctgaggtcaagttcaactggtacgtggacggcgtggaggtgcataatgccaagacaaagccgcgggaggagcagtacaacagcacgtaccgtgtggtcagcgtcctcaccgtcctgcaccaggactggctgaatggcaaggagtacaagtgcaaggtctccaacaaagccctcccagcctccatcgagaaaaccatctccaaagccaaagggcagccccgagaaccacaggtgtacaccctgcccccatgccgggaggagatgaccaagaaccaggtcagcctgtggtgcctggtcaaaggcttctatcccagcgacatcgccgtggagtgggagagcaatgggcagccggagaacaactacaagaccacgcctcccgtgctggactccgacggctccttcttcctctacagcaagctcaccgtggacaagagcaggtggcagcaggggaacgtcttctcatgctccgtgatgcatgaggctctgcacaaccactacacgcagaagagcctctccctgtctccgggcaaaggtggaggctccggcggtggctctggcggcggttctggcggtggttctggtagcacgggcgaagtccaattggtggagagtggtggcggactagtgcaacccggcggctccttgcgactcagctgcgctgctagcggttttgactttactgcctacgccatgcactgggttaggcaggctcccggcaagggcctggaatgggttgcctctatctatcctagtggcggctataccgcctatgccgactctgtcaagggccgattcaccattagtgctgacacttccaagaacacagcttatctgcaaatgaacagtttacgtgctgaggacaccgccgtgtactattgcgcgaggcgcagttactatttcgccctggattactggggccagggcacactggtgacagtgtctagcggaggtggtggcagcgatattcagatgacacagagccccagttccctgtccgcatccgttggagaccgcgtcaccatcacctgccgggccagtcagtctgtctcaagtgctgttgcatggtaccaacaaaagcctggcaaagcacctaagctcctgatctattccgcctcttccctgtactctggagttccttctaggtttagtggcagccggagtggcaccgacttcacattgactattagctctttgcaaccggaggatttcgctacctactactgtcaacaatactgggcgtattattcgcccatcacattcgggcaaggcacaaaggtcgagatcaagtaatag

SEQ ID NO: 1042 - DNA, 2109 bp, Artificial Sequence
  Synthetic polynucleotide
gaagtgcagttggtggagtctggcggtggcttggtccaaccgggtggcagcctgaggctgagctgtgccgcaagtggcttcacactaagttcttactccatgcattgggttaggcaagctcctggcaagggtctggaatgggtagcctacatctcttcctatgattcaattactgactacgcggacagtgtcaaggggagattcacgataagtgccgacacctccaagaacacagcttacttgcaaatgaatagcctgcgagctgaggacacagctgtttactactgtgctaggccagccgttgggcacatggcctttgattattggggccagggcaccctggtgacagttagttctgctagcaccaagggcccatcggtcttccccctggcaccctcctccaagagcacctctgggggcacagcggccctgggctgcctggtcaaggactacttccccgaaccggtgacggtgtcgtggaactcaggcgccctgaccagcggcgtgcacaccttcccggccgtcctacagtcctcaggactctactccctcagcagcgtggtgaccgtgccctccagcagcttgggcacccagacctacatctgcaacgtgaatcacaagcccagcaacaccaaggtggacaagaaggttgagcccaaatcttgtgacaaaactcacacatgcccaccgtgcccagcacctgaactcctggggggaccgtcagtcttcctcttccccccaaaacccaaggacaccctcatgatctcccggacccctgaggtcacatgcgtggtggtggccgtgagccacgaagaccctgaggtcaagttcaactggtacgtggacggcgtggaggtgcataatgccaagacaaagccgcgggaggagcagtacggcagcacgtaccgtgtggtcagcgtcctcaccgtcctgcaccaggactggctgaatggcaaggagtacaagtgcaaggtctccaacaaagccctcccagcccccatcgagaaaaccatctccaaagccaaagggcagccccgagaaccaatggtgttcgacctgcccccatcccgggaggagatgaccaagaaccaggtcagcctgtggtgcatggtcaaaggcttctatcccagcgacatcgccgtggagtgggagagcaatgggcagccggagaacaactacaagaccacgcctcccgtgctggactccgacggctccttcttcctctacagcaagctcaccgtggacaagagcaggtggcagcaggggaacgtcttctcatgctccgtgatgcatgaggctctgcacaaccactacacgcagaagagcctctccctgtctccgggcaaaggtggaggctccggcggtggctctggcggcggttctggcggtggttctggtagcacgggcgaagtccaattggtggagagtggtggcggactagtgcaacccggcggctccttgcgactcagctgcgctgctagcggttttgactttactgcctacgccatgcactgggttaggcaggctcccggcaagggcctggaatgggttgcctctatctatcctagtggcggctataccgcctatgccgactctgtcaagggccgattcaccattagtgctgacacttccaagaacacagcttatctgcaaatgaacagtttacgtgctgaggacaccgccgtgtactattgcgcgaggcgcagttactatttcgccctggattactggggccagggcacactggtgacagtgtctagcggaggtggtggcagcgatattcagatgacacagagccccagttccctgtccgcatccgttggagaccgcgtcaccatcacctgccgggccagtcagtctgtctcaagtgctgttgcatggtaccaacaaaagcctggcaaagcacctaagctcctgatctattccgcctcttccctgtactctggagttccttctaggtttagtggcagccggagtggcaccgacttcacattgactattagctctttgcaaccggaggatttcgctacctactactgtcaacaatactgggcgtattattcgcccatcacattcgggcaaggcacaaaggtcgagatcaagtaatag

SEQ ID NO: 1043 - DNA, 2109 bp, Artificial Sequence
  Synthetic polynucleotide
gaagtgcagttggtggagtctggcggtggcttggtccaaccgggtggcagcctgaggctgagctgtgccgcaagtggcttcacactaagttcttactccatgcattgggttaggcaagctcctggcaagggtctggaatgggtagcctacatctcttcctatgattcaattactgactacgcggacagtgtcaaggggagattcacgataagtgccgacacctccaagaacacagcttacttgcaaatgaatagcctgcgagctgaggacacagctgtttactactgtgctaggccagccgttgggcacatggcctttgattattggggccagggcaccctggtgacagttagttctgctagcaccaagggcccatcggtcttccccctggcaccctcctccaagagcacctctgggggcacagcggccctgggctgcctggtcaaggactacttccccgaaccggtgacggtgtcgtggaactcaggcgccctgaccagcggcgtgcacaccttcccggccgtcctacagtcctcaggactctactccctcagcagcgtggtgaccgtgccctccagcagcttgggcacccagacctacatctgcaacgtgaatcacaagcccagcaacaccaaggtggacaagaaggttgagcccaaatcttgtgacaaaactcacacatgcccaccgtgcccagcacctgaagccgccgggggaccgtcagtcttcctcttccccccaaaacccaaggacaccctcatgatctcccggacccctgaggtcacatgcgtggtggtggacgtgagccacgaagaccctgaggtcaagttcaactggtacgtggacggcgtggaggtgcataatgccaagacaaagccgcgggaggagcagtacaacagcacgtaccgtgtggtcagcgtcctcaccgtcctgcaccaggactggctgaatggcaaggagtacaagtgcaaggtctccaacaaagccctcccagcctccatcgagaaaaccatctccaaagccaaagggcagccccgagaaccaatggtgttcgacctgcccccatcccgggaggagatgaccaagaaccaggtcagcctgtggtgcatggtcaaaggcttctatcccagcgacatcgccgtggagtgggagagcaatgggcagccggagaacaactacaagaccacgcctcccgtgctggactccgacggctccttcttcctctacagcaagctcaccgtggacaagagcaggtggcagcaggggaacgtcttctcatgctccgtgatgcatgaggctctgcacaaccactacacgcagaagagcctctccctgtctccgggcaaaggtggaggctccggcggtggctctggcggcggttctggcggtggttctggtagcacgggcgaagtccaattggtggagagtggtggcggactagtgcaacccggcggctccttgcgactcagctgcgctgctagcggttttgactttactgcctacgccatgcactgggttaggcaggctcccggcaagggcctggaatgggttgcctctatctatcctagtggcggctataccgcctatgccgactctgtcaagggccgattcaccattagtgctgacacttccaagaacacagcttatctgcaaatgaacagtttacgtgctgaggacaccgccgtgtactattgcgcgaggcgcagttactatttcgccctggattactggggccagggcacactggtgacagtgtctagcggaggtggtggcagcgatattcagatgacacagagccccagttccctgtccgcatccgttggagaccgcgtcaccatcacctgccgggccagtcagtctgtctcaagtgctgttgcatggtaccaacaaaagcctggcaaagcacctaagctcctgatctattccgcctcttccctgtactctggagttccttctaggtttagtggcagccggagtggcaccgacttcacattgactattagctctttgcaaccggaggatttcgctacctactactgtcaacaatactgggcgtattattcgcccatcacattcgggcaaggcacaaaggtcgagatcaagtaatag

SEQ ID NO: 1044 - DNA, 2109 bp, Artificial Sequence
  Synthetic polynucleotide
gaagtgcagttggtggagtctggcggtggcttggtccaaccgggtggcagcctgaggctgagctgtgccgcaagtggcttcacactaagttcttactccatgcattgggttaggcaagctcctggcaagggtctggaatgggtagcctacatctcttcctatgattcaattactgactacgcggacagtgtcaaggggagattcacgataagtgccgacacctccaagaacacagcttacttgcaaatgaatagcctgcgagctgaggacacagctgtttactactgtgctaggccagccgttgggcacatggcctttgattattggggccagggcaccctggtgacagttagttctgctagcaccaagggcccatcggtcttccccctggcaccctcctccaagagcacctctgggggcacagcggccctgggctgcctggtcaaggactacttccccgaaccggtgacggtgtcgtggaactcaggcgccctgaccagcggcgtgcacaccttcccggccgtcctacagtcctcaggactctactccctcagcagcgtggtgaccgtgccctccagcagcttgggcacccagacctacatctgcaacgtgaatcacaagcccagcaacaccaaggtggacaagaaggttgagcccaaatcttgtgacaaaactcacacatgcccaccgtgcccagcacctgaagccgccgggggaccgtcagtcttcctcttccccccaaaacccaaggacaccctcatgatctcccggacccctgaggtcacatgcgtggtggtggacgtgagccacgaagaccctgaggtcaagttcaactggtacgtggacggcgtggaggtgcataatgccaagacaaagccgcgggaggagcagtacaacagcacgtaccgtgtggtcagcgtcctcaccgtcctgcaccaggactggctgaatggcaaggagtacaagtgcaaggtctccaacaaagccctcccagcctccatcgagaaaaccatctccaaagccaaagggcagccccgagaaccacaggtgtacaccctgcccccatcccgggaggagatgaccaagaaccaggtcagcctgtggtgcctggtcaaaggcttctatcccagcgacatcgccgtggagtgggagagcaatgggcagccggagaacaactacaagaccacgcctcccgtgctggactccgacggctccttcttcctctacagcaagctcaccgtggacaagagcaggtggcagcaggggaacgtcttctcatgctccgtgatgcatgaggctctgcacaaccactacacgcagaagagcctctccctgtctccgggcaaaggtggaggctccggcggtggctctggcggcggttctggcggtggttctggtagcacgggcgaagtccaattggtggagagtggtggcggactagtgcaacccggcggctccttgcgactcagctgcgctgctagcggttttgactttactgcctacgccatgcactgggttaggcaggctcccggcaagggcctggaatgggttgcctctatctatcctagtggcggctataccgcctatgccgactctgtcaagggccgattcaccattagtgctgacacttccaagaacacagcttatctgcaaatgaacagtttacgtgctgaggacaccgccgtgtactattgcgcgaggcgcagttactatttcgccctggattactggggccagggcacactggtgacagtgtctagcggaggtggtggcagcgatattcagatgacacagagccccagttccctgtccgcatccgttggagaccgcgtcaccatcacctgccgggccagtcagtctgtctcaagtgctgttgcatggtaccaacaaaagcctggcaaagcacctaagctcctgatctattccgcctcttccctgtactctggagttccttctaggtttagtggcagccggagtggcaccgacttcacattgactattagctctttgcaaccggaggatttcgctacctactactgtcaacaatactgggcgtattattcgcccatcacattcgggcaaggcacaaaggtcgagatcaagtaatag

SEQ ID NO: 1045 - DNA, 2109 bp, Artificial Sequence
  Synthetic polynucleotide
gaagtgcagttggtggagtctggcggtggcttggtccaaccgggtggcagcctgaggctgagctgtgccgcaagtggcttcacactaagttcttactccatgcattgggttaggcaagctcctggcaagggtctggaatgggtagcctacatctcttcctatgattcaattactgactacgcggacagtgtcaaggggagattcacgataagtgccgacacctccaagaacacagcttacttgcaaatgaatagcctgcgagctgaggacacagctgtttactactgtgctaggccagccgttgggcacatggcctttgattattggggccagggcaccctggtgacagttagttctgctagcaccaagggcccatcggtcttccccctggcaccctcctccaagagcacctctgggggcacagcggccctgggctgcctggtcaaggactacttccccgaaccggtgacggtgtcgtggaactcaggcgccctgaccagcggcgtgcacaccttcccggccgtcctacagtcctcaggactctactccctcagcagcgtggtgaccgtgccctccagcagcttgggcacccagacctacatctgcaacgtgaatcacaagcccagcaacaccaaggtggacaagaaggttgagcccaaatcttgtgacaaaactcacacatgcccaccgtgcccagcacctgaagccgccgggggaccgtcagtcttcctcttccccccaaaacccaaggacaccctcatgatctcccggacccctgaggtcacatgcgtggtggtggacgtgagccacgaagaccctgaggtcaagttcaactggtacgtggacggcgtggaggtgcataatgccaagacaaagccgcgggaggagcagtacaacagcacgtaccgtgtggtcagcgtcctcaccgtcctgcaccaggactggctgaatggcaaggagtacaagtgcaaggtctccaacaaagccctcccagcctccatcgagaaaaccatctccaaagccaaagggcagccccgagaaccacaggtgtacaccctgcccccatgccgggaggagatgaccaagaaccaggtcagcctgtggtgcctggtcaaaggcttctatcccagcgacatcgccgtggagtgggagagcaatgggcagccggagaacaactacaagaccacgcctcccgtgctggactccgacggctccttcttcctctacagcaagctcaccgtggacaagagcaggtggcagcaggggaacgtcttctcatgctccgtgatgcatgaggctctgcacaaccactacacgcagaagagcctctccctgtctccgggcaaaggtggaggctccggcggtggctctggcggcggttctggcggtggttctggtagcacgggcgaagtccaattggtggagagtggtggcggactagtgcaacccggcggctccttgcgactcagctgcgctgctagcggttttgactttactgcctacgccatgcactgggttaggcaggctcccggcaagggcctggaatgggttgcctctatctatcctagtggcggctataccgcctatgccgactctgtcaagggccgattcaccattagtgctgacacttccaagaacacagcttatctgcaaatgaacagtttacgtgctgaggacaccgccgtgtactattgcgcgaggcgcagttactatttcgccctggattactggggccagggcacactggtgacagtgtctagcggaggtggtggcagcgatattcagatgacacagagccccagttccctgtccgcatccgttggagaccgcgtcaccatcacctgccgggccagtcagtctgtctcaagtgctgttgcatggtaccaacaaaagcctggcaaagcacctaagctcctgatctattccgcctcttccctgtactctggagttccttctaggtttagtggcagccggagtggcaccgacttcacattgactattagctctttgcaaccggaggatttcgctacctactactgtcaacaatactgggcgtattattcgcccatcacattcgggcaaggcacaaaggtcgagatcaagtaatag

SEQ ID NO: 1046 - DNA, 2214 bp, Artificial Sequence
  Synthetic polynucleotide
atgggatggtcatgtatcatcctttttctggtagcaactgcaactggagtacatagcgaggtgcagctggtcgagtccggtggtggcctagtacaacccggcggctctctccggctgtcctgcgctgcctccggatttgacttctcctcaagttccattcactgggtcaggcaggctcctggcaaaggactggaatgggttgccagtatctcctcctcttacggctacacctactacgcggactcagttaaggggagattcaccatctccgcggataccagcaagaatactgcttacctgcaaatgaatagtttgcgggccgaggatactgctgtgtattattgcgcccggagttgggctatggactactggggccaggggactctcgtgaccgtgtcttccggcggcggtggatctgacatccagatgacacagtctccaagctcattgtctgcctctgttggagaccgagtgacaatcacatgccgggccagccagtctgtgtcttctgccgtggcttggtaccaacaaaaacctggcaaggctcccaaattgctcatctattccgcatccgacttatactctggcgtcccttctcgcttctctgggagcagatccggaaccgattttacattgaccatctctagtctgcaacctgaggacttcgccacctactattgccaacaatatgccggcgctggactcattacttttggacaaggtaccaaagtggagatcaagggtggcggtggaagtggtggaggaggtagtgagcccaaatcttccgacaaaactcacacatgcccaccgtgcccagcacctgaactcctggggggaccgtcagtcttcctcttccccccaaaacccaaggacaccctcatgatctcccggacccctgaggtcacatgcgtggtggtggccgtgagccacgaagaccctgaggtcaagttcaactggtacgtggacggcgtggaggtgcataatgccaagacaaagccgcgggaggagcagtacggcagcacgtaccgtgtggtcagcgtcctcaccgtcctgcaccaggactggctgaatggcaaggagtacaagtgcaaggtctccaacaaagccctcccagcccccatcgagaaaaccatctccaaagccaaagggcagccccgagaaccacaggtgtacaccctgcccccaatccgggagctgatgacctccaaccaggtcagcctgagctgcgccgtcaaaggcttctatcccagcgacatcgccgtggagtgggagagcaatgggcagccggagaacaactacaagaccacgcctcccgtgctggactccgacggctccttcttcctcgtgagcaagctcaccgtggacaagagcaggtggcagcaggggaacgtcttctcatgctccgtgatgcatgaggctctgcacaaccactacacgcagaagagcctctccctgtctccgggcaaaggcggaggaagcggcggaggcagcggaggcggtagcggcggcggatcaggaagtacaggggaggtacagctggtggagagcggaggggggctagtgcaacctgggggcagtctgcgactgtcatgtgctgcaagcgggtttaccctgtcttcatatagcatgcactgggtccgacaagctcccggcaagggcttggaatgggtcgcatacatttcaagttacgactcaatcactgactatgccgattccgtgaagggccggttcaccatttccgcggacacctccaaaaacacagcatatcttcaaatgaacagtctaagggcggaagataccgctgtttactattgtgcacgacccgcggttggtcatatggcttttgactactggggccagggcaccctagtgacagtctcttccgcttccactaaggggccctctgtctttcctctggcaccatcctccaaatcaacgtcaggtggcacagccgccctcggctgtctggttaaggactactttcccgaacccgttaccgtttcttggaactctggcgccctcacatccggagtccacacatttcctgctgtcctacaatcttctggactgtactccttgagctccgtagttacggtgccctcatctagcctgggtactcagacttacatttgtaacgtgaaccacaagcccagcaacacaaaagtggacaagaaggttgagcccaagtcctgtgacaaaacccacacataatag

SEQ ID NO: 1047 - DNA, 2214 bp, Artificial Sequence
  Synthetic polynucleotide
atgggatggtcatgtatcatcctttttctggtagcaactgcaactggagtacatagcgaggtgcagctggtcgagtccggtggtggcctagtacaacccggcggctctctccggctgtcctgcgctgcctccggatttgacttctcctcaagttccattcactgggtcaggcaggctcctggcaaaggactggaatgggttgccagtatctcctcctcttacggctacacctactacgcggactcagttaaggggagattcaccatctccgcggataccagcaagaatactgcttacctgcaaatgaatagtttgcgggccgaggatactgctgtgtattattgcgcccggagttgggctatggactactggggccaggggactctcgtgaccgtgtcttccggcggcggtggatctgacatccagatgacacagtctccaagctcattgtctgcctctgttggagaccgagtgacaatcacatgccgggccagccagtctgtgtcttctgccgtggcttggtaccaacaaaaacctggcaaggctcccaaattgctcatctattccgcatccgacttatactctggcgtcccttctcgcttctctgggagcagatccggaaccgattttacattgaccatctctagtctgcaacctgaggacttcgccacctactattgccaacaatatgccggcgctggactcattacttttggacaaggtaccaaagtggagatcaagggtggcggtggaagtggtggaggaggtagtgagcccaaatcttccgacaaaactcacacatgcccaccgtgcccagcacctgaagccgccgggggaccgtcagtcttcctcttccccccaaaacccaaggacaccctcatgatctcccggacccctgaggtcacatgcgtggtggtggacgtgagccacgaagaccctgaggtcaagttcaactggtacgtggacggcgtggaggtgcataatgccaagacaaagccgcgggaggagcagtacaacagcacgtaccgtgtggtcagcgtcctcaccgtcctgcaccaggactggctgaatggcaaggagtacaagtgcaaggtctccaacaaagccctcccagcctccatcgagaaaaccatctccaaagccaaagggcagccccgagaaccacaggtgtacaccctgcccccaatccgggagctgatgacctccaaccaggtcagcctgagctgcgccgtcaaaggcttctatcccagcgacatcgccgtggagtgggagagcaatgggcagccggagaacaactacaagaccacgcctcccgtgctggactccgacggctccttcttcctcgtgagcaagctcaccgtggacaagagcaggtggcagcaggggaacgtcttctcatgctccgtgatgcatgaggctctgcacaaccactacacgcagaagagcctctccctgtctccgggcaaaggcggaggaagcggcggaggcagcggaggcggtagcggcggcggatcaggaagtacaggggaggtacagctggtggagagcggaggggggctagtgcaacctgggggcagtctgcgactgtcatgtgctgcaagcgggtttaccctgtcttcatatagcatgcactgggtccgacaagctcccggcaagggcttggaatgggtcgcatacatttcaagttacgactcaatcactgactatgccgattccgtgaagggccggttcaccatttccgcggacacctccaaaaacacagcatatcttcaaatgaacagtctaagggcggaagataccgctgtttactattgtgcacgacccgcggttggtcatatggcttttgactactggggccagggcaccctagtgacagtctcttccgcttccactaaggggccctctgtctttcctctggcaccatcctccaaatcaacgtcaggtggcacagccgccctcggctgtctggttaaggactactttcccgaacccgttaccgtttcttggaactctggcgccctcacatccggagtccacacatttcctgctgtcctacaatcttctggactgtactccttgagctccgtagttacggtgccctcatctagcctgggtactcagacttacatttgtaacgtgaaccacaagcccagcaacacaaaagtggacaagaaggttgagcccaagtcctgtgacaaaacccacacataatag

SEQ ID NO: 1048 - DNA, 2214 bp, Artificial Sequence
  Synthetic polynucleotide
atgggatggtcatgtatcatcctttttctggtagcaactgcaactggagtacatagcgaggtgcagctggtcgagtccggtggtggcctagtacaacccggcggctctctccggctgtcctgcgctgcctccggatttgacttctcctcaagttccattcactgggtcaggcaggctcctggcaaaggactggaatgggttgccagtatctcctcctcttacggctacacctactacgcggactcagttaaggggagattcaccatctccgcggataccagcaagaatactgcttacctgcaaatgaatagtttgcgggccgaggatactgctgtgtattattgcgcccggagttgggctatggactactggggccaggggactctcgtgaccgtgtcttccggcggcggtggatctgacatccagatgacacagtctccaagctcattgtctgcctctgttggagaccgagtgacaatcacatgccgggccagccagtctgtgtcttctgccgtggcttggtaccaacaaaaacctggcaaggctcccaaattgctcatctattccgcatccgacttatactctggcgtcccttctcgcttctctgggagcagatccggaaccgattttacattgaccatctctagtctgcaacctgaggacttcgccacctactattgccaacaatatgccggcgctggactcattacttttggacaaggtaccaaagtggagatcaagggtggcggtggaagtggtggaggaggtagtgagcccaaatcttccgacaaaactcacacatgcccaccgtgcccagcacctgaagccgccgggggaccgtcagtcttcctcttccccccaaaacccaaggacaccctcatgatctcccggacccctgaggtcacatgcgtggtggtggacgtgagccacgaagaccctgaggtcaagttcaactggtacgtggacggcgtggaggtgcataatgccaagacaaagccgcgggaggagcagtacaacagcacgtaccgtgtggtcagcgtcctcaccgtcctgcaccaggactggctgaatggcaaggagtacaagtgcaaggtctccaacaaagccctcccagcctccatcgagaaaaccatctccaaagccaaagggcagccccgagaaccacaggtgtacaccctgcccccatcccgggaggagatgaccaagaaccaggtcagcctgagctgcgccgtcaaaggcttctatcccagcgacatcgccgtggagtgggagagcaatgggcagccggagaacaactacaagaccacgcctcccgtgctggactccgacggctccttcttcctcgtgagcaagctcaccgtggacaagagcaggtggcagcaggggaacgtcttctcatgctccgtgatgcatgaggctctgcacaaccactacacgcagaagagcctctccctgtctccgggcaaaggcggaggaagcggcggaggcagcggaggcggtagcggcggcggatcaggaagtacaggggaggtacagctggtggagagcggaggggggctagtgcaacctgggggcagtctgcgactgtcatgtgctgcaagcgggtttaccctgtcttcatatagcatgcactgggtccgacaagctcccggcaagggcttggaatgggtcgcatacatttcaagttacgactcaatcactgactatgccgattccgtgaagggccggttcaccatttccgcggacacctccaaaaacacagcatatcttcaaatgaacagtctaagggcggaagataccgctgtttactattgtgcacgacccgcggttggtcatatggcttttgactactggggccagggcaccctagtgacagtctcttccgcttccactaaggggccctctgtctttcctctggcaccatcctccaaatcaacgtcaggtggcacagccgccctcggctgtctggttaaggactactttcccgaacccgttaccgtttcttggaactctggcgccctcacatccggagtccacacatttcctgctgtcctacaatcttctggactgtactccttgagctccgtagttacggtgccctcatctagcctgggtactcagacttacatttgtaacgtgaaccacaagcccagcaacacaaaagtggacaagaaggttgagcccaagtcctgtgacaaaacccacacataatag

SEQ ID NO: 1049 - DNA, 2214 bp, Artificial Sequence
  Synthetic polynucleotide
atgggatggtcatgtatcatcctttttctggtagcaactgcaactggagtacatagcgaggtgcagctggtcgagtccggtggtggcctagtacaacccggcggctctctccggctgtcctgcgctgcctccggatttgacttctcctcaagttccattcactgggtcaggcaggctcctggcaaaggactggaatgggttgccagtatctcctcctcttacggctacacctactacgcggactcagttaaggggagattcaccatctccgcggataccagcaagaatactgcttacctgcaaatgaatagtttgcgggccgaggatactgctgtgtattattgcgcccggagttgggctatggactactggggccaggggactctcgtgaccgtgtcttccggcggcggtggatctgacatccagatgacacagtctccaagctcattgtctgcctctgttggagaccgagtgacaatcacatgccgggccagccagtctgtgtcttctgccgtggcttggtaccaacaaaaacctggcaaggctcccaaattgctcatctattccgcatccgacttatactctggcgtcccttctcgcttctctgggagcagatccggaaccgattttacattgaccatctctagtctgcaacctgaggacttcgccacctactattgccaacaatatgccggcgctggactcattacttttggacaaggtaccaaagtggagatcaagggtggcggtggaagtggtggaggaggtagtgagcccaaatcttccgacaaaactcacacatgcccaccgtgcccagcacctgaagccgccgggggaccgtcagtcttcctcttccccccaaaacccaaggacaccctcatgatctcccggacccctgaggtcacatgcgtggtggtggacgtgagccacgaagaccctgaggtcaagttcaactggtacgtggacggcgtggaggtgcataatgccaagacaaagccgcgggaggagcagtacaacagcacgtaccgtgtggtcagcgtcctcaccgtcctgcaccaggactggctgaatggcaaggagtacaagtgcaaggtctccaacaaagccctcccagcctccatcgagaaaaccatctccaaagccaaagggcagccccgagaaccacaggtgtgcaccctgcccccatcccgggaggagatgaccaagaaccaggtcagcctgagctgcgccgtcaaaggcttctatcccagcgacatcgccgtggagtgggagagcaatgggcagccggagaacaactacaagaccacgcctcccgtgctggactccgacggctccttcttcctcgtgagcaagctcaccgtggacaagagcaggtggcagcaggggaacgtcttctcatgctccgtgatgcatgaggctctgcacaaccactacacgcagaagagcctctccctgtctccgggcaaaggcggaggaagcggcggaggcagcggaggcggtagcggcggcggatcaggaagtacaggggaggtacagctggtggagagcggaggggggctagtgcaacctgggggcagtctgcgactgtcatgtgctgcaagcgggtttaccctgtcttcatatagcatgcactgggtccgacaagctcccggcaagggcttggaatgggtcgcatacatttcaagttacgactcaatcactgactatgccgattccgtgaagggccggttcaccatttccgcggacacctccaaaaacacagcatatcttcaaatgaacagtctaagggcggaagataccgctgtttactattgtgcacgacccgcggttggtcatatggcttttgactactggggccagggcaccctagtgacagtctcttccgcttccactaaggggccctctgtctttcctctggcaccatcctccaaatcaacgtcaggtggcacagccgccctcggctgtctggttaaggactactttcccgaacccgttaccgtttcttggaactctggcgccctcacatccggagtccacacatttcctgctgtcctacaatcttctggactgtactccttgagctccgtagttacggtgccctcatctagcctgggtactcagacttacatttgtaacgtgaaccacaagcccagcaacacaaaagtggacaagaaggttgagcccaagtcctgtgacaaaacccacacataatag

SEQ ID NO: 1050 - DNA, 2157 bp, Artificial Sequence
  Synthetic polynucleotide
gaggtgcagctggtcgagtccggtggtggcctagtacaacccggcggctctctccggctgtcctgcgctgcctccggatttgacttctcctcaagttccattcactgggtcaggcaggctcctggcaaaggactggaatgggttgccagtatctcctcctcttacggctacacctactacgcggactcagttaaggggagattcaccatctccgcggataccagcaagaatactgcttacctgcaaatgaatagtttgcgggccgaggatactgctgtgtattattgcgcccggagttgggctatggactactggggccaggggactctcgtgaccgtgtcttccggcggcggtggatctgacatccagatgacacagtctccaagctcattgtctgcctctgttggagaccgagtgacaatcacatgccgggccagccagtctgtgtcttctgccgtggcttggtaccaacaaaaacctggcaaggctcccaaattgctcatctattccgcatccgacttatactctggcgtcccttctcgcttctctgggagcagatccggaaccgattttacattgaccatctctagtctgcaacctgaggacttcgccacctactattgccaacaatatgccggcgctggactcattacttttggacaaggtaccaaagtggagatcaagggtggcggtggaagtggtggaggaggtagtgagcccaaatcttccgacaaaactcacacatgcccaccgtgcccagcacctgaactcctggggggaccgtcagtcttcctcttccccccaaaacccaaggacaccctcatgatctcccggacccctgaggtcacatgcgtggtggtggccgtgagccacgaagaccctgaggtcaagttcaactggtacgtggacggcgtggaggtgcataatgccaagacaaagccgcgggaggagcagtacggcagcacgtaccgtgtggtcagcgtcctcaccgtcctgcaccaggactggctgaatggcaaggagtacaagtgcaaggtctccaacaaagccctcccagcccccatcgagaaaaccatctccaaagccaaagggcagccccgagaaccacaggtgtacaccctgcccccaatccgggagctgatgacctccaaccaggtcagcctgagctgcgccgtcaaaggcttctatcccagcgacatcgccgtggagtgggagagcaatgggcagccggagaacaactacaagaccacgcctcccgtgctggactccgacggctccttcttcctcgtgagcaagctcaccgtggacaagagcaggtggcagcaggggaacgtcttctcatgctccgtgatgcatgaggctctgcacaaccactacacgcagaagagcctctccctgtctccgggcaaaggcggaggaagcggcggaggcagcggaggcggtagcggcggcggatcaggaagtacaggggaggtacagctggtggagagcggaggggggctagtgcaacctgggggcagtctgcgactgtcatgtgctgcaagcgggtttaccctgtcttcatatagcatgcactgggtccgacaagctcccggcaagggcttggaatgggtcgcatacatttcaagttacgactcaatcactgactatgccgattccgtgaagggccggttcaccatttccgcggacacctccaaaaacacagcatatcttcaaatgaacagtctaagggcggaagataccgctgtttactattgtgcacgacccgcggttggtcatatggcttttgactactggggccagggcaccctagtgacagtctcttccgcttccactaaggggccctctgtctttcctctggcaccatcctccaaatcaacgtcaggtggcacagccgccctcggctgtctggttaaggactactttcccgaacccgttaccgtttcttggaactctggcgccctcacatccggagtccacacatttcctgctgtcctacaatcttctggactgtactccttgagctccgtagttacggtgccctcatctagcctgggtactcagacttacatttgtaacgtgaaccacaagcccagcaacacaaaagtggacaagaaggttgagcccaagtcctgtgacaaaacccacacataatag

SEQ ID NO: 1051 - DNA, 2157 bp, Artificial Sequence
  Synthetic polynucleotide
gaggtgcagctggtcgagtccggtggtggcctagtacaacccggcggctctctccggctgtcctgcgctgcctccggatttgacttctcctcaagttccattcactgggtcaggcaggctcctggcaaaggactggaatgggttgccagtatctcctcctcttacggctacacctactacgcggactcagttaaggggagattcaccatctccgcggataccagcaagaatactgcttacctgcaaatgaatagtttgcgggccgaggatactgctgtgtattattgcgcccggagttgggctatggactactggggccaggggactctcgtgaccgtgtcttccggcggcggtggatctgacatccagatgacacagtctccaagctcattgtctgcctctgttggagaccgagtgacaatcacatgccgggccagccagtctgtgtcttctgccgtggcttggtaccaacaaaaacctggcaaggctcccaaattgctcatctattccgcatccgacttatactctggcgtcccttctcgcttctctgggagcagatccggaaccgattttacattgaccatctctagtctgcaacctgaggacttcgccacctactattgccaacaatatgccggcgctggactcattacttttggacaaggtaccaaagtggagatcaagggtggcggtggaagtggtggaggaggtagtgagcccaaatcttccgacaaaactcacacatgcccaccgtgcccagcacctgaagccgccgggggaccgtcagtcttcctcttccccccaaaacccaaggacaccctcatgatctcccggacccctgaggtcacatgcgtggtggtggacgtgagccacgaagaccctgaggtcaagttcaactggtacgtggacggcgtggaggtgcataatgccaagacaaagccgcgggaggagcagtacaacagcacgtaccgtgtggtcagcgtcctcaccgtcctgcaccaggactggctgaatggcaaggagtacaagtgcaaggtctccaacaaagccctcccagcctccatcgagaaaaccatctccaaagccaaagggcagccccgagaaccacaggtgtacaccctgcccccaatccgggagctgatgacctccaaccaggtcagcctgagctgcgccgtcaaaggcttctatcccagcgacatcgccgtggagtgggagagcaatgggcagccggagaacaactacaagaccacgcctcccgtgctggactccgacggctccttcttcctcgtgagcaagctcaccgtggacaagagcaggtggcagcaggggaacgtcttctcatgctccgtgatgcatgaggctctgcacaaccactacacgcagaagagcctctccctgtctccgggcaaaggcggaggaagcggcggaggcagcggaggcggtagcggcggcggatcaggaagtacaggggaggtacagctggtggagagcggaggggggctagtgcaacctgggggcagtctgcgactgtcatgtgctgcaagcgggtttaccctgtcttcatatagcatgcactgggtccgacaagctcccggcaagggcttggaatgggtcgcatacatttcaagttacgactcaatcactgactatgccgattccgtgaagggccggttcaccatttccgcggacacctccaaaaacacagcatatcttcaaatgaacagtctaagggcggaagataccgctgtttactattgtgcacgacccgcggttggtcatatggcttttgactactggggccagggcaccctagtgacagtctcttccgcttccactaaggggccctctgtctttcctctggcaccatcctccaaatcaacgtcaggtggcacagccgccctcggctgtctggttaaggactactttcccgaacccgttaccgtttcttggaactctggcgccctcacatccggagtccacacatttcctgctgtcctacaatcttctggactgtactccttgagctccgtagttacggtgccctcatctagcctgggtactcagacttacatttgtaacgtgaaccacaagcccagcaacacaaaagtggacaagaaggttgagcccaagtcctgtgacaaaacccacacataatag

SEQ ID NO: 1052 - DNA, 2157 bp, Artificial Sequence
  Synthetic polynucleotide
gaggtgcagctggtcgagtccggtggtggcctagtacaacccggcggctctctccggctgtcctgcgctgcctccggatttgacttctcctcaagttccattcactgggtcaggcaggctcctggcaaaggactggaatgggttgccagtatctcctcctcttacggctacacctactacgcggactcagttaaggggagattcaccatctccgcggataccagcaagaatactgcttacctgcaaatgaatagtttgcgggccgaggatactgctgtgtattattgcgcccggagttgggctatggactactggggccaggggactctcgtgaccgtgtcttccggcggcggtggatctgacatccagatgacacagtctccaagctcattgtctgcctctgttggagaccgagtgacaatcacatgccgggccagccagtctgtgtcttctgccgtggcttggtaccaacaaaaacctggcaaggctcccaaattgctcatctattccgcatccgacttatactctggcgtcccttctcgcttctctgggagcagatccggaaccgattttacattgaccatctctagtctgcaacctgaggacttcgccacctactattgccaacaatatgccggcgctggactcattacttttggacaaggtaccaaagtggagatcaagggtggcggtggaagtggtggaggaggtagtgagcccaaatcttccgacaaaactcacacatgcccaccgtgcccagcacctgaagccgccgggggaccgtcagtcttcctcttccccccaaaacccaaggacaccctcatgatctcccggacccctgaggtcacatgcgtggtggtggacgtgagccacgaagaccctgaggtcaagttcaactggtacgtggacggcgtggaggtgcataatgccaagacaaagccgcgggaggagcagtacaacagcacgtaccgtgtggtcagcgtcctcaccgtcctgcaccaggactggctgaatggcaaggagtacaagtgcaaggtctccaacaaagccctcccagcctccatcgagaaaaccatctccaaagccaaagggcagccccgagaaccacaggtgtacaccctgcccccatcccgggaggagatgaccaagaaccaggtcagcctgagctgcgccgtcaaaggcttctatcccagcgacatcgccgtggagtgggagagcaatgggcagccggagaacaactacaagaccacgcctcccgtgctggactccgacggctccttcttcctcgtgagcaagctcaccgtggacaagagcaggtggcagcaggggaacgtcttctcatgctccgtgatgcatgaggctctgcacaaccactacacgcagaagagcctctccctgtctccgggcaaaggcggaggaagcggcggaggcagcggaggcggtagcggcggcggatcaggaagtacaggggaggtacagctggtggagagcggaggggggctagtgcaacctgggggcagtctgcgactgtcatgtgctgcaagcgggtttaccctgtcttcatatagcatgcactgggtccgacaagctcccggcaagggcttggaatgggtcgcatacatttcaagttacgactcaatcactgactatgccgattccgtgaagggccggttcaccatttccgcggacacctccaaaaacacagcatatcttcaaatgaacagtctaagggcggaagataccgctgtttactattgtgcacgacccgcggttggtcatatggcttttgactactggggccagggcaccctagtgacagtctcttccgcttccactaaggggccctctgtctttcctctggcaccatcctccaaatcaacgtcaggtggcacagccgccctcggctgtctggttaaggactactttcccgaacccgttaccgtttcttggaactctggcgccctcacatccggagtccacacatttcctgctgtcctacaatcttctggactgtactccttgagctccgtagttacggtgccctcatctagcctgggtactcagacttacatttgtaacgtgaaccacaagcccagcaacacaaaagtggacaagaaggttgagcccaagtcctgtgacaaaacccacacataatag

SEQ ID NO: 1053 - DNA, 2157 bp, Artificial Sequence
  Synthetic polynucleotide
gaggtgcagctggtcgagtccggtggtggcctagtacaacccggcggctctctccggctgtcctgcgctgcctccggatttgacttctcctcaagttccattcactgggtcaggcaggctcctggcaaaggactggaatgggttgccagtatctcctcctcttacggctacacctactacgcggactcagttaaggggagattcaccatctccgcggataccagcaagaatactgcttacctgcaaatgaatagtttgcgggccgaggatactgctgtgtattattgcgcccggagttgggctatggactactggggccaggggactctcgtgaccgtgtcttccggcggcggtggatctgacatccagatgacacagtctccaagctcattgtctgcctctgttggagaccgagtgacaatcacatgccgggccagccagtctgtgtcttctgccgtggcttggtaccaacaaaaacctggcaaggctcccaaattgctcatctattccgcatccgacttatactctggcgtcccttctcgcttctctgggagcagatccggaaccgattttacattgaccatctctagtctgcaacctgaggacttcgccacctactattgccaacaatatgccggcgctggactcattacttttggacaaggtaccaaagtggagatcaagggtggcggtggaagtggtggaggaggtagtgagcccaaatcttccgacaaaactcacacatgcccaccgtgcccagcacctgaagccgccgggggaccgtcagtcttcctcttccccccaaaacccaaggacaccctcatgatctcccggacccctgaggtcacatgcgtggtggtggacgtgagccacgaagaccctgaggtcaagttcaactggtacgtggacggcgtggaggtgcataatgccaagacaaagccgcgggaggagcagtacaacagcacgtaccgtgtggtcagcgtcctcaccgtcctgcaccaggactggctgaatggcaaggagtacaagtgcaaggtctccaacaaagccctcccagcctccatcgagaaaaccatctccaaagccaaagggcagccccgagaaccacaggtgtgcaccctgcccccatcccgggaggagatgaccaagaaccaggtcagcctgagctgcgccgtcaaaggcttctatcccagcgacatcgccgtggagtgggagagcaatgggcagccggagaacaactacaagaccacgcctcccgtgctggactccgacggctccttcttcctcgtgagcaagctcaccgtggacaagagcaggtggcagcaggggaacgtcttctcatgctccgtgatgcatgaggctctgcacaaccactacacgcagaagagcctctccctgtctccgggcaaaggcggaggaagcggcggaggcagcggaggcggtagcggcggcggatcaggaagtacaggggaggtacagctggtggagagcggaggggggctagtgcaacctgggggcagtctgcgactgtcatgtgctgcaagcgggtttaccctgtcttcatatagcatgcactgggtccgacaagctcccggcaagggcttggaatgggtcgcatacatttcaagttacgactcaatcactgactatgccgattccgtgaagggccggttcaccatttccgcggacacctccaaaaacacagcatatcttcaaatgaacagtctaagggcggaagataccgctgtttactattgtgcacgacccgcggttggtcatatggcttttgactactggggccagggcaccctagtgacagtctcttccgcttccactaaggggccctctgtctttcctctggcaccatcctccaaatcaacgtcaggtggcacagccgccctcggctgtctggttaaggactactttcccgaacccgttaccgtttcttggaactctggcgccctcacatccggagtccacacatttcctgctgtcctacaatcttctggactgtactccttgagctccgtagttacggtgccctcatctagcctgggtactcagacttacatttgtaacgtgaaccacaagcccagcaacacaaaagtggacaagaaggttgagcccaagtcctgtgacaaaacccacacataatag

SEQ ID NO: 1054 - DNA, 2226 bp, Artificial Sequence
  Synthetic polynucleotide
atgggatggtcatgtatcatcctttttctggtagcaactgcaactggagtacatagcgaggtccagctcgttgagtctggaggcggactagttcaacctggcggttctctgcgcctgtcctgtgccgcctctggctttgacttcaccgcatatgccatgcactgggttaggcaggccccaggcaaggggctggaatgggttgcctctatatacccttccggaggatacacagcctacgctgatagtgtcaaaggccggttcaccattagcgctgatacctccaagaatactgcctacttgcaaatgaacagcttaagggctgaggatacagcagtctattactgtgcacggcgatcttactactttgctctggattactggggccaaggcaccctggtcactgttagttctggcggtggtggctcagacatccagatgacccagagccccagtagcctatcggcctcggttggcgatcgagtgaccattacctgccgggcaagccagagtgtttcaagcgcagtggcttggtatcagcaaaagcctggcaaagctccaaaactgcttatctactcggcgagctccttatatagcggcgtgcctagtagattcagcggctcccggtctggaacagactttaccctcacaattagctctctccaacctgaagacttcgccacatattattgccaacaatattgggcctactattcccctatcacctttggtcaaggaaccaaggtggagatcaagggaggaggtggttcaggtggtggaggaagcgagcccaaatcttccgacaaaactcacacatgcccaccgtgcccagcacctgaactcctggggggaccgtcagtcttcctcttccccccaaaacccaaggacaccctcatgatctcccggacccctgaggtcacatgcgtggtggtggccgtgagccacgaagaccctgaggtcaagttcaactggtacgtggacggcgtggaggtgcataatgccaagacaaagccgcgggaggagcagtacggcagcacgtaccgtgtggtcagcgtcctcaccgtcctgcaccaggactggctgaatggcaaggagtacaagtgcaaggtctccaacaaagccctcccagcccccatcgagaaaaccatctccaaagccaaagggcagccccgagaaccaatggtgttcgacctgcccccatcccgggaggagatgaccaagaaccaggtcagcctgtggtgcatggtcaaaggcttctatcccagcgacatcgccgtggagtgggagagcaatgggcagccggagaacaactacaagaccacgcctcccgtgctggactccgacggctccttcttcctctacagcaagctcaccgtggacaagagcaggtggcagcaggggaacgtcttctcatgctccgtgatgcatgaggctctgcacaaccactacacgcagaagagcctctccctgtctccgggcaaaggtggtggctctggcggcggtagcgggggaggatctggtggcggttctggctcaaccggagaggtccagcttgtggagtccggcggtggactggttcaacctggcggctcactccgcctgtcctgtgccgcttccggcttcaccctgagttcttattcaatgcattgggttaggcaggcacctggcaaaggactggaatgggtggcttatatttcatcctatgactcgataacggactacgccgattctgtgaaaggtcggttcaccatctctgctgacacctccaaaaatactgcttacctccaaatgaacagtctgcgggctgaagatactgccgtgtactactgtgcaagacctgcggttgggcatatggcttttgactactggggtcaggggacactggtcactgtctcctcggcgtctaccaaaggacctagcgtgttccccctggctccctcatccaaatccactagcggcggtaccgccgccctcggctgcctcgttaaggattacttccctgaaccagtaactgtttcttggaatagcggtgcactcacctctggcgtgcacaccttccctgccgtcctgcaatcctccgggctgtatagtctctcttctgtcgtgactgtgccctcttcttcccttggcacccaaacctatatttgcaatgtgaaccacaaaccttcaaacacaaaggtggacaagaaggtggaacccaaatcctgtgataaaacacacacttaatag

SEQ ID NO: 1055 - DNA, 2226 bp, Artificial Sequence
  Synthetic polynucleotide
atgggatggtcatgtatcatcctttttctggtagcaactgcaactggagtacatagcgaggtccagctcgttgagtctggaggcggactagttcaacctggcggttctctgcgcctgtcctgtgccgcctctggctttgacttcaccgcatatgccatgcactgggttaggcaggccccaggcaaggggctggaatgggttgcctctatatacccttccggaggatacacagcctacgctgatagtgtcaaaggccggttcaccattagcgctgatacctccaagaatactgcctacttgcaaatgaacagcttaagggctgaggatacagcagtctattactgtgcacggcgatcttactactttgctctggattactggggccaaggcaccctggtcactgttagttctggcggtggtggctcagacatccagatgacccagagccccagtagcctatcggcctcggttggcgatcgagtgaccattacctgccgggcaagccagagtgtttcaagcgcagtggcttggtatcagcaaaagcctggcaaagctccaaaactgcttatctactcggcgagctccttatatagcggcgtgcctagtagattcagcggctcccggtctggaacagactttaccctcacaattagctctctccaacctgaagacttcgccacatattattgccaacaatattgggcctactattcccctatcacctttggtcaaggaaccaaggtggagatcaagggaggaggtggttcaggtggtggaggaagcgagcccaaatcttccgacaaaactcacacatgcccaccgtgcccagcacctgaagccgccgggggaccgtcagtcttcctcttccccccaaaacccaaggacaccctcatgatctcccggacccctgaggtcacatgcgtggtggtggacgtgagccacgaagaccctgaggtcaagttcaactggtacgtggacggcgtggaggtgcataatgccaagacaaagccgcgggaggagcagtacaacagcacgtaccgtgtggtcagcgtcctcaccgtcctgcaccaggactggctgaatggcaaggagtacaagtgcaaggtctccaacaaagccctcccagcctccatcgagaaaaccatctccaaagccaaagggcagccccgagaaccaatggtgttcgacctgcccccatcccgggaggagatgaccaagaaccaggtcagcctgtggtgcatggtcaaaggcttctatcccagcgacatcgccgtggagtgggagagcaatgggcagccggagaacaactacaagaccacgcctcccgtgctggactccgacggctccttcttcctctacagcaagctcaccgtggacaagagcaggtggcagcaggggaacgtcttctcatgctccgtgatgcatgaggctctgcacaaccactacacgcagaagagcctctccctgtctccgggcaaaggtggtggctctggcggcggtagcgggggaggatctggtggcggttctggctcaaccggagaggtccagcttgtggagtccggcggtggactggttcaacctggcggctcactccgcctgtcctgtgccgcttccggcttcaccctgagttcttattcaatgcattgggttaggcaggcacctggcaaaggactggaatgggtggcttatatttcatcctatgactcgataacggactacgccgattctgtgaaaggtcggttcaccatctctgctgacacctccaaaaatactgcttacctccaaatgaacagtctgcgggctgaagatactgccgtgtactactgtgcaagacctgcggttgggcatatggcttttgactactggggtcaggggacactggtcactgtctcctcggcgtctaccaaaggacctagcgtgttccccctggctccctcatccaaatccactagcggcggtaccgccgccctcggctgcctcgttaaggattacttccctgaaccagtaactgtttcttggaatagcggtgcactcacctctggcgtgcacaccttccctgccgtcctgcaatcctccgggctgtatagtctctcttctgtcgtgactgtgccctcttcttcccttggcacccaaacctatatttgcaatgtgaaccacaaaccttcaaacacaaaggtggacaagaaggtggaacccaaatcctgtgataaaacacacacttaatag

SEQ ID NO: 1056 - DNA, 2226 bp, Artificial Sequence
  Synthetic polynucleotide
atgggatggtcatgtatcatcctttttctggtagcaactgcaactggagtacatagcgaggtccagctcgttgagtctggaggcggactagttcaacctggcggttctctgcgcctgtcctgtgccgcctctggctttgacttcaccgcatatgccatgcactgggttaggcaggccccaggcaaggggctggaatgggttgcctctatatacccttccggaggatacacagcctacgctgatagtgtcaaaggccggttcaccattagcgctgatacctccaagaatactgcctacttgcaaatgaacagcttaagggctgaggatacagcagtctattactgtgcacggcgatcttactactttgctctggattactggggccaaggcaccctggtcactgttagttctggcggtggtggctcagacatccagatgacccagagccccagtagcctatcggcctcggttggcgatcgagtgaccattacctgccgggcaagccagagtgtttcaagcgcagtggcttggtatcagcaaaagcctggcaaagctccaaaactgcttatctactcggcgagctccttatatagcggcgtgcctagtagattcagcggctcccggtctggaacagactttaccctcacaattagctctctccaacctgaagacttcgccacatattattgccaacaatattgggcctactattcccctatcacctttggtcaaggaaccaaggtggagatcaagggaggaggtggttcaggtggtggaggaagcgagcccaaatcttccgacaaaactcacacatgcccaccgtgcccagcacctgaagccgccgggggaccgtcagtcttcctcttccccccaaaacccaaggacaccctcatgatctcccggacccctgaggtcacatgcgtggtggtggacgtgagccacgaagaccctgaggtcaagttcaactggtacgtggacggcgtggaggtgcataatgccaagacaaagccgcgggaggagcagtacaacagcacgtaccgtgtggtcagcgtcctcaccgtcctgcaccaggactggctgaatggcaaggagtacaagtgcaaggtctccaacaaagccctcccagcctccatcgagaaaaccatctccaaagccaaagggcagccccgagaaccacaggtgtacaccctgcccccatcccgggaggagatgaccaagaaccaggtcagcctgtggtgcctggtcaaaggcttctatcccagcgacatcgccgtggagtgggagagcaatgggcagccggagaacaactacaagaccacgcctcccgtgctggactccgacggctccttcttcctctacagcaagctcaccgtggacaagagcaggtggcagcaggggaacgtcttctcatgctccgtgatgcatgaggctctgcacaaccactacacgcagaagagcctctccctgtctccgggcaaaggtggtggctctggcggcggtagcgggggaggatctggtggcggttctggctcaaccggagaggtccagcttgtggagtccggcggtggactggttcaacctggcggctcactccgcctgtcctgtgccgcttccggcttcaccctgagttcttattcaatgcattgggttaggcaggcacctggcaaaggactggaatgggtggcttatatttcatcctatgactcgataacggactacgccgattctgtgaaaggtcggttcaccatctctgctgacacctccaaaaatactgcttacctccaaatgaacagtctgcgggctgaagatactgccgtgtactactgtgcaagacctgcggttgggcatatggcttttgactactggggtcaggggacactggtcactgtctcctcggcgtctaccaaaggacctagcgtgttccccctggctccctcatccaaatccactagcggcggtaccgccgccctcggctgcctcgttaaggattacttccctgaaccagtaactgtttcttggaatagcggtgcactcacctctggcgtgcacaccttccctgccgtcctgcaatcctccgggctgtatagtctctcttctgtcgtgactgtgccctcttcttcccttggcacccaaacctatatttgcaatgtgaaccacaaaccttcaaacacaaaggtggacaagaaggtggaacccaaatcctgtgataaaacacacacttaatag

SEQ ID NO: 1057 - DNA, 2226 bp, Artificial Sequence
  Synthetic polynucleotide
atgggatggtcatgtatcatcctttttctggtagcaactgcaactggagtacatagcgaggtccagctcgttgagtctggaggcggactagttcaacctggcggttctctgcgcctgtcctgtgccgcctctggctttgacttcaccgcatatgccatgcactgggttaggcaggccccaggcaaggggctggaatgggttgcctctatatacccttccggaggatacacagcctacgctgatagtgtcaaaggccggttcaccattagcgctgatacctccaagaatactgcctacttgcaaatgaacagcttaagggctgaggatacagcagtctattactgtgcacggcgatcttactactttgctctggattactggggccaaggcaccctggtcactgttagttctggcggtggtggctcagacatccagatgacccagagccccagtagcctatcggcctcggttggcgatcgagtgaccattacctgccgggcaagccagagtgtttcaagcgcagtggcttggtatcagcaaaagcctggcaaagctccaaaactgcttatctactcggcgagctccttatatagcggcgtgcctagtagattcagcggctcccggtctggaacagactttaccctcacaattagctctctccaacctgaagacttcgccacatattattgccaacaatattgggcctactattcccctatcacctttggtcaaggaaccaaggtggagatcaagggaggaggtggttcaggtggtggaggaagcgagcccaaatcttccgacaaaactcacacatgcccaccgtgcccagcacctgaagccgccgggggaccgtcagtcttcctcttccccccaaaacccaaggacaccctcatgatctcccggacccctgaggtcacatgcgtggtggtggacgtgagccacgaagaccctgaggtcaagttcaactggtacgtggacggcgtggaggtgcataatgccaagacaaagccgcgggaggagcagtacaacagcacgtaccgtgtggtcagcgtcctcaccgtcctgcaccaggactggctgaatggcaaggagtacaagtgcaaggtctccaacaaagccctcccagcctccatcgagaaaaccatctccaaagccaaagggcagccccgagaaccacaggtgtacaccctgcccccatgccgggaggagatgaccaagaaccaggtcagcctgtggtgcctggtcaaaggcttctatcccagcgacatcgccgtggagtgggagagcaatgggcagccggagaacaactacaagaccacgcctcccgtgctggactccgacggctccttcttcctctacagcaagctcaccgtggacaagagcaggtggcagcaggggaacgtcttctcatgctccgtgatgcatgaggctctgcacaaccactacacgcagaagagcctctccctgtctccgggcaaaggtggtggctctggcggcggtagcgggggaggatctggtggcggttctggctcaaccggagaggtccagcttgtggagtccggcggtggactggttcaacctggcggctcactccgcctgtcctgtgccgcttccggcttcaccctgagttcttattcaatgcattgggttaggcaggcacctggcaaaggactggaatgggtggcttatatttcatcctatgactcgataacggactacgccgattctgtgaaaggtcggttcaccatctctgctgacacctccaaaaatactgcttacctccaaatgaacagtctgcgggctgaagatactgccgtgtactactgtgcaagacctgcggttgggcatatggcttttgactactggggtcaggggacactggtcactgtctcctcggcgtctaccaaaggacctagcgtgttccccctggctccctcatccaaatccactagcggcggtaccgccgccctcggctgcctcgttaaggattacttccctgaaccagtaactgtttcttggaatagcggtgcactcacctctggcgtgcacaccttccctgccgtcctgcaatcctccgggctgtatagtctctcttctgtcgtgactgtgccctcttcttcccttggcacccaaacctatatttgcaatgtgaaccacaaaccttcaaacacaaaggtggacaagaaggtggaacccaaatcctgtgataaaacacacacttaatag

SEQ ID NO: 1058 - DNA, 2169 bp, Artificial Sequence
  Synthetic polynucleotide
gaggtccagctcgttgagtctggaggcggactagttcaacctggcggttctctgcgcctgtcctgtgccgcctctggctttgacttcaccgcatatgccatgcactgggttaggcaggccccaggcaaggggctggaatgggttgcctctatatacccttccggaggatacacagcctacgctgatagtgtcaaaggccggttcaccattagcgctgatacctccaagaatactgcctacttgcaaatgaacagcttaagggctgaggatacagcagtctattactgtgcacggcgatcttactactttgctctggattactggggccaaggcaccctggtcactgttagttctggcggtggtggctcagacatccagatgacccagagccccagtagcctatcggcctcggttggcgatcgagtgaccattacctgccgggcaagccagagtgtttcaagcgcagtggcttggtatcagcaaaagcctggcaaagctccaaaactgcttatctactcggcgagctccttatatagcggcgtgcctagtagattcagcggctcccggtctggaacagactttaccctcacaattagctctctccaacctgaagacttcgccacatattattgccaacaatattgggcctactattcccctatcacctttggtcaaggaaccaaggtggagatcaagggaggaggtggttcaggtggtggaggaagcgagcccaaatcttccgacaaaactcacacatgcccaccgtgcccagcacctgaactcctggggggaccgtcagtcttcctcttccccccaaaacccaaggacaccctcatgatctcccggacccctgaggtcacatgcgtggtggtggccgtgagccacgaagaccctgaggtcaagttcaactggtacgtggacggcgtggaggtgcataatgccaagacaaagccgcgggaggagcagtacggcagcacgtaccgtgtggtcagcgtcctcaccgtcctgcaccaggactggctgaatggcaaggagtacaagtgcaaggtctccaacaaagccctcccagcccccatcgagaaaaccatctccaaagccaaagggcagccccgagaaccaatggtgttcgacctgcccccatcccgggaggagatgaccaagaaccaggtcagcctgtggtgcatggtcaaaggcttctatcccagcgacatcgccgtggagtgggagagcaatgggcagccggagaacaactacaagaccacgcctcccgtgctggactccgacggctccttcttcctctacagcaagctcaccgtggacaagagcaggtggcagcaggggaacgtcttctcatgctccgtgatgcatgaggctctgcacaaccactacacgcagaagagcctctccctgtctccgggcaaaggtggtggctctggcggcggtagcgggggaggatctggtggcggttctggctcaaccggagaggtccagcttgtggagtccggcggtggactggttcaacctggcggctcactccgcctgtcctgtgccgcttccggcttcaccctgagttcttattcaatgcattgggttaggcaggcacctggcaaaggactggaatgggtggcttatatttcatcctatgactcgataacggactacgccgattctgtgaaaggtcggttcaccatctctgctgacacctccaaaaatactgcttacctccaaatgaacagtctgcgggctgaagatactgccgtgtactactgtgcaagacctgcggttgggcatatggcttttgactactggggtcaggggacactggtcactgtctcctcggcgtctaccaaaggacctagcgtgttccccctggctccctcatccaaatccactagcggcggtaccgccgccctcggctgcctcgttaaggattacttccctgaaccagtaactgtttcttggaatagcggtgcactcacctctggcgtgcacaccttccctgccgtcctgcaatcctccgggctgtatagtctctcttctgtcgtgactgtgccctcttcttcccttggcacccaaacctatatttgcaatgtgaaccacaaaccttcaaacacaaaggtggacaagaaggtggaacccaaatcctgtgataaaacacacacttaatag

SEQ ID NO: 1059 - DNA, 2169 bp, Artificial Sequence
  Synthetic polynucleotide
gaggtccagctcgttgagtctggaggcggactagttcaacctggcggttctctgcgcctgtcctgtgccgcctctggctttgacttcaccgcatatgccatgcactgggttaggcaggccccaggcaaggggctggaatgggttgcctctatatacccttccggaggatacacagcctacgctgatagtgtcaaaggccggttcaccattagcgctgatacctccaagaatactgcctacttgcaaatgaacagcttaagggctgaggatacagcagtctattactgtgcacggcgatcttactactttgctctggattactggggccaaggcaccctggtcactgttagttctggcggtggtggctcagacatccagatgacccagagccccagtagcctatcggcctcggttggcgatcgagtgaccattacctgccgggcaagccagagtgtttcaagcgcagtggcttggtatcagcaaaagcctggcaaagctccaaaactgcttatctactcggcgagctccttatatagcggcgtgcctagtagattcagcggctcccggtctggaacagactttaccctcacaattagctctctccaacctgaagacttcgccacatattattgccaacaatattgggcctactattcccctatcacctttggtcaaggaaccaaggtggagatcaagggaggaggtggttcaggtggtggaggaagcgagcccaaatcttccgacaaaactcacacatgcccaccgtgcccagcacctgaagccgccgggggaccgtcagtcttcctcttccccccaaaacccaaggacaccctcatgatctcccggacccctgaggtcacatgcgtggtggtggacgtgagccacgaagaccctgaggtcaagttcaactggtacgtggacggcgtggaggtgcataatgccaagacaaagccgcgggaggagcagtacaacagcacgtaccgtgtggtcagcgtcctcaccgtcctgcaccaggactggctgaatggcaaggagtacaagtgcaaggtctccaacaaagccctcccagcctccatcgagaaaaccatctccaaagccaaagggcagccccgagaaccaatggtgttcgacctgcccccatcccgggaggagatgaccaagaaccaggtcagcctgtggtgcatggtcaaaggcttctatcccagcgacatcgccgtggagtgggagagcaatgggcagccggagaacaactacaagaccacgcctcccgtgctggactccgacggctccttcttcctctacagcaagctcaccgtggacaagagcaggtggcagcaggggaacgtcttctcatgctccgtgatgcatgaggctctgcacaaccactacacgcagaagagcctctccctgtctccgggcaaaggtggtggctctggcggcggtagcgggggaggatctggtggcggttctggctcaaccggagaggtccagcttgtggagtccggcggtggactggttcaacctggcggctcactccgcctgtcctgtgccgcttccggcttcaccctgagttcttattcaatgcattgggttaggcaggcacctggcaaaggactggaatgggtggcttatatttcatcctatgactcgataacggactacgccgattctgtgaaaggtcggttcaccatctctgctgacacctccaaaaatactgcttacctccaaatgaacagtctgcgggctgaagatactgccgtgtactactgtgcaagacctgcggttgggcatatggcttttgactactggggtcaggggacactggtcactgtctcctcggcgtctaccaaaggacctagcgtgttccccctggctccctcatccaaatccactagcggcggtaccgccgccctcggctgcctcgttaaggattacttccctgaaccagtaactgtttcttggaatagcggtgcactcacctctggcgtgcacaccttccctgccgtcctgcaatcctccgggctgtatagtctctcttctgtcgtgactgtgccctcttcttcccttggcacccaaacctatatttgcaatgtgaaccacaaaccttcaaacacaaaggtggacaagaaggtggaacccaaatcctgtgataaaacacacacttaatag

SEQ ID NO: 1060 - DNA, 2169 bp, Artificial Sequence
  Synthetic polynucleotide
gaggtccagctcgttgagtctggaggcggactagttcaacctggcggttctctgcgcctgtcctgtgccgcctctggctttgacttcaccgcatatgccatgcactgggttaggcaggccccaggcaaggggctggaatgggttgcctctatatacccttccggaggatacacagcctacgctgatagtgtcaaaggccggttcaccattagcgctgatacctccaagaatactgcctacttgcaaatgaacagcttaagggctgaggatacagcagtctattactgtgcacggcgatcttactactttgctctggattactggggccaaggcaccctggtcactgttagttctggcggtggtggctcagacatccagatgacccagagccccagtagcctatcggcctcggttggcgatcgagtgaccattacctgccgggcaagccagagtgtttcaagcgcagtggcttggtatcagcaaaagcctggcaaagctccaaaactgcttatctactcggcgagctccttatatagcggcgtgcctagtagattcagcggctcccggtctggaacagactttaccctcacaattagctctctccaacctgaagacttcgccacatattattgccaacaatattgggcctactattcccctatcacctttggtcaaggaaccaaggtggagatcaagggaggaggtggttcaggtggtggaggaagcgagcccaaatcttccgacaaaactcacacatgcccaccgtgcccagcacctgaagccgccgggggaccgtcagtcttcctcttccccccaaaacccaaggacaccctcatgatctcccggacccctgaggtcacatgcgtggtggtggacgtgagccacgaagaccctgaggtcaagttcaactggtacgtggacggcgtggaggtgcataatgccaagacaaagccgcgggaggagcagtacaacagcacgtaccgtgtggtcagcgtcctcaccgtcctgcaccaggactggctgaatggcaaggagtacaagtgcaaggtctccaacaaagccctcccagcctccatcgagaaaaccatctccaaagccaaagggcagccccgagaaccacaggtgtacaccctgcccccatcccgggaggagatgaccaagaaccaggtcagcctgtggtgcctggtcaaaggcttctatcccagcgacatcgccgtggagtgggagagcaatgggcagccggagaacaactacaagaccacgcctcccgtgctggactccgacggctccttcttcctctacagcaagctcaccgtggacaagagcaggtggcagcaggggaacgtcttctcatgctccgtgatgcatgaggctctgcacaaccactacacgcagaagagcctctccctgtctccgggcaaaggtggtggctctggcggcggtagcgggggaggatctggtggcggttctggctcaaccggagaggtccagcttgtggagtccggcggtggactggttcaacctggcggctcactccgcctgtcctgtgccgcttccggcttcaccctgagttcttattcaatgcattgggttaggcaggcacctggcaaaggactggaatgggtggcttatatttcatcctatgactcgataacggactacgccgattctgtgaaaggtcggttcaccatctctgctgacacctccaaaaatactgcttacctccaaatgaacagtctgcgggctgaagatactgccgtgtactactgtgcaagacctgcggttgggcatatggcttttgactactggggtcaggggacactggtcactgtctcctcggcgtctaccaaaggacctagcgtgttccccctggctccctcatccaaatccactagcggcggtaccgccgccctcggctgcctcgttaaggattacttccctgaaccagtaactgtttcttggaatagcggtgcactcacctctggcgtgcacaccttccctgccgtcctgcaatcctccgggctgtatagtctctcttctgtcgtgactgtgccctcttcttcccttggcacccaaacctatatttgcaatgtgaaccacaaaccttcaaacacaaaggtggacaagaaggtggaacccaaatcctgtgataaaacacacacttaatag

SEQ ID NO: 1061 - DNA, 2169 bp, Artificial Sequence
  Synthetic polynucleotide
gaggtccagctcgttgagtctggaggcggactagttcaacctggcggttctctgcgcctgtcctgtgccgcctctggctttgacttcaccgcatatgccatgcactgggttaggcaggccccaggcaaggggctggaatgggttgcctctatatacccttccggaggatacacagcctacgctgatagtgtcaaaggccggttcaccattagcgctgatacctccaagaatactgcctacttgcaaatgaacagcttaagggctgaggatacagcagtctattactgtgcacggcgatcttactactttgctctggattactggggccaaggcaccctggtcactgttagttctggcggtggtggctcagacatccagatgacccagagccccagtagcctatcggcctcggttggcgatcgagtgaccattacctgccgggcaagccagagtgtttcaagcgcagtggcttggtatcagcaaaagcctggcaaagctccaaaactgcttatctactcggcgagctccttatatagcggcgtgcctagtagattcagcggctcccggtctggaacagactttaccctcacaattagctctctccaacctgaagacttcgccacatattattgccaacaatattgggcctactattcccctatcacctttggtcaaggaaccaaggtggagatcaagggaggaggtggttcaggtggtggaggaagcgagcccaaatcttccgacaaaactcacacatgcccaccgtgcccagcacctgaagccgccgggggaccgtcagtcttcctcttccccccaaaacccaaggacaccctcatgatctcccggacccctgaggtcacatgcgtggtggtggacgtgagccacgaagaccctgaggtcaagttcaactggtacgtggacggcgtggaggtgcataatgccaagacaaagccgcgggaggagcagtacaacagcacgtaccgtgtggtcagcgtcctcaccgtcctgcaccaggactggctgaatggcaaggagtacaagtgcaaggtctccaacaaagccctcccagcctccatcgagaaaaccatctccaaagccaaagggcagccccgagaaccacaggtgtacaccctgcccccatgccgggaggagatgaccaagaaccaggtcagcctgtggtgcctggtcaaaggcttctatcccagcgacatcgccgtggagtgggagagcaatgggcagccggagaacaactacaagaccacgcctcccgtgctggactccgacggctccttcttcctctacagcaagctcaccgtggacaagagcaggtggcagcaggggaacgtcttctcatgctccgtgatgcatgaggctctgcacaaccactacacgcagaagagcctctccctgtctccgggcaaaggtggtggctctggcggcggtagcgggggaggatctggtggcggttctggctcaaccggagaggtccagcttgtggagtccggcggtggactggttcaacctggcggctcactccgcctgtcctgtgccgcttccggcttcaccctgagttcttattcaatgcattgggttaggcaggcacctggcaaaggactggaatgggtggcttatatttcatcctatgactcgataacggactacgccgattctgtgaaaggtcggttcaccatctctgctgacacctccaaaaatactgcttacctccaaatgaacagtctgcgggctgaagatactgccgtgtactactgtgcaagacctgcggttgggcatatggcttttgactactggggtcaggggacactggtcactgtctcctcggcgtctaccaaaggacctagcgtgttccccctggctccctcatccaaatccactagcggcggtaccgccgccctcggctgcctcgttaaggattacttccctgaaccagtaactgtttcttggaatagcggtgcactcacctctggcgtgcacaccttccctgccgtcctgcaatcctccgggctgtatagtctctcttctgtcgtgactgtgccctcttcttcccttggcacccaaacctatatttgcaatgtgaaccacaaaccttcaaacacaaaggtggacaagaaggtggaacccaaatcctgtgataaaacacacacttaatag

SEQ ID NO: 1062 - DNA, 708 bp, Artificial Sequence
  Synthetic polynucleotide
atggagacagacacactcctgctatgggtactgctgctctgggttccaggctccaccggcgacatccagatgacccagtctcctagctccctgtccgcgtcggttggagaccgggtaactattacttgccgagcaagccagtccgtgtcatctgcggtggcctggtatcagcaaaagcccggcaaggcccctaagcttctgatctattccgcctcttctctgtatagcggcgtgccatcacggttctctggatctcgctctgggaccgacttcactctcactatttccagcttgcagccagaagattttgcaacatattactgtcaacaatggtacaacgctcctatcactttcggccaaggcaccaaggtggagatcaagcgtacggtggctgcaccatctgtcttcatcttcccgccatctgatgagcagttgaaatctggaactgcctctgttgtgtgcctgctgaataacttctatcccagagaggccaaagtacagtggaaggtggataacgccctccaatcgggtaactcccaggagagtgtcacagagcaggacagcaaggacagcacctacagcctcagcagcaccctgacgctgagcaaagcagactacgagaaacacaaagtctacgcctgcgaagtcacccatcagggcctgagctcgcccgtcacaaagagcttcaacaggggagagtgttaatag

SEQ ID NO: 1063 - DNA, 648 bp, Artificial Sequence
  Synthetic polynucleotide
gacatccagatgacccagtctcctagctccctgtccgcgtcggttggagaccgggtaactattacttgccgagcaagccagtccgtgtcatctgcggtggcctggtatcagcaaaagcccggcaaggcccctaagcttctgatctattccgcctcttctctgtatagcggcgtgccatcacggttctctggatctcgctctgggaccgacttcactctcactatttccagcttgcagccagaagattttgcaacatattactgtcaacaatggtacaacgctcctatcactttcggccaaggcaccaaggtggagatcaagcgtacggtggctgcaccatctgtcttcatcttcccgccatctgatgagcagttgaaatctggaactgcctctgttgtgtgcctgctgaataacttctatcccagagaggccaaagtacagtggaaggtggataacgccctccaatcgggtaactcccaggagagtgtcacagagcaggacagcaaggacagcacctacagcctcagcagcaccctgacgctgagcaaagcagactacgagaaacacaaagtctacgcctgcgaagtcacccatcagggcctgagctcgcccgtcacaaagagcttcaacaggggagagtgttaatag
